United States Patent Application Publication US 2026/0058010 A1 - sequence listing, part 39

SEQ ID NO: 463 - DNA, 923592 bp, Homo sapiens
  source 1..923592: mol_type = genomic DNA
gctgaagtgggaggactgtttgagtctgggaggtagagactgcagtgaacagtgaccctgccactgcatttcagcctgggttacagagtaagactgttttttaaacaaaacaaaacaaaacaaaacaaaacaaaacaaaacaaaaaaacaggccgggcgtggtggctcatgcctgtaagcccagcactttgggacaccaaggtgggcagatcacctgaggtcaggagttcaaaaccagcctggccaaaatggtgaaaccccctctctactataaatacaaaaattggctgggcatggtggtgcgtgcctgtaatcccagctacttgggaggctgaggcagaagaatcgcttgagcccaggaggtggaggttgcagtgagcagagatcgcaccactgtactccagctgggcaacagagtgagactccgcctcaaataaataaacaaacaaacaaaaaacctagacaaacctagagctccagtttgaaccatggtatgtcatcttttcactggaagatgtgctttcagaagcggcctgaacatttggtttacctattaaaataaaaactgtacatactttatgatctatctttgagaaacagacaaatctgcaaggagccgtgtggatcttcattgtcattttttgttgtagttaaaagtgtaaagtcaaaagcaatctgggtgtacatcaatggagaaatagccatattcactctgtgatagccatactatgcaattttatgaagcacttaaaatagatatagtttgattcatactaaaatgaaaaagagctccaagacacggatgctaaaaaaaaagaaaaaaaaggaagtcgaaggatgatactatactgtactgtactatttaagacttgtcaatctcaggttctcccaccaaaacagcacaacacatgaagtaagtgtataggaaatttcggaatgatgaactccaaacaggatatgcatctgtagcaagggctacctccggagagaagggtaggggaatgaggcggtctttgaccttgacagtaatttatggtttttaacaaggagagtgcattcttcatctattagttttgcttttgttggctgtgaaaattaattttttgagaaatagtactgattgtgatttcttctctattcagtgaggaaagggagtgacaggtaatgattctgtatcaaggctgattaaagaataaaagaaggcctttctgaagattaaaaaacaaataaaaagttgagaagaaagagcacgaagagtagaagggaacaatggtgtactcgccagcaatggcaatacgggttattaaaaagaagggtgggggcggggaaccctggccgactcaggacgccacgggaggaagccacgcaaaatagcaaaccgggatcctagaggggcggggcccacctcagcgcgcaggcgcaaccaggcccaggtggccgccgcggaagcgaagccacctatacgcgccgcgccgcttgggtctcctgcgcatgcgcagacggacctgcgctggaggcttcatctttgccgccgctgccgtcgccttcctgggattggagtctcgagctttcttcgttcgttcgtcggcgggttcgcgcccttctcgcgcctcggggctgcgaggctggggaaggggttggagggggctgttgatcgccgcgtttaagttgcgctcggggcggccatgtcggccggcgaggtcgagcgcctagtgtcggagctgagcggcgggaccggaggggatgaggaggaagagtggctctatggcggtacgaaacttcctgtctctgtctctcgggttctctcaggcctcccctcttggccctcaaacggccggcgtccctggcctctcgcgccgccgcttcgggcctctggttgggagtcctgtccggcctgacttaggccgagcgcggcgtgcgcgtgcccccagtccccgcggcggtctcccgcctggcccacgcccaccatgcgcatccacccctgtggcggccgggccgggctggggggctgtgaccggtcctggcccccggcttcgctgtgctttccccgaggcgtctcgatcgcctagctgctgcgctctttacccttgtttttttctgtcgattctgaggtggtggtttttggtgtctgtttttgccctgtggccttagggtgcccttcctgtcccttctttcagaaacagtcattctgtaataatagctaaataaagttaatgctgtacaactaacgtcttgtttcttgatggtcagtttgtatggaatgcacctgcaagggtacctccttgtctgaaagtcgtgctttaaaaataattaattaagagagagagagagaaagatggcccataaagaaaactctgaatgtctcctgtattaaggtgaagttattcttttttaagagactaccgtttaacctacatcatggaggtatctcatgacccttcggcttatagttttcagtgtcatctcatgtatttgtttttctcaaaataaatttaatgcatcatgtacttctctctagaagggtacttgtttgacatctggtttttaactttaagtcacaatcccttcttgcttgttaacaccagatttgaaagttaatgtttgttccttgcctaaaacatatattcttgattgtctttagaatagaatagtaaaagtgcactttgggcaccatgcaggtccttgatgatgtgactttgataaacttgtaaaaaaaaatcgtttggtggcaagatttagcattagttactactctttgaaatgtgaatgtgtaggatttcttttacaaagatctggaaatcttcattacctcttaaatttaagcttatttttatagcagtaaagtctgatttttttttccataaaataagtatcttgttaagtaattataaggtgatctaactttggatgtgcttataggcccatgggacgtgcatgtgcacagtgatttggcaaaggacctaggttagtgcttgtgatgatcacttcagattttcataatactagtttctttaagagtggtttctttattttgtttgcttatttatttatttgtttattttacttggtagatgaaaatgaagttgaaaggccagaagaagaaaatgccaggttagtgaaattttctgttgatgcctattacacaggttgtgtgaaacaatggttctgtcagttgtcaaaattattttcttacaatcattggcttcattacaacactgacttacaacattttggaggacattgaatcctttaaggattattccagtttcaggacctaatcttacgccaattctatttgttggtagtttaaaggacaaagtttttgaacttaggattggactgattttacactgttaagtaacttgttactcttaagtgaattcagtagtgaagtatacagtataatcgttaagctactgataaaaatattttaacttaattgaaaatgtttttaagtaaatcaggaacactccaaactactgcttttccagtttattaacatttttgatgatataatggcagtttggttgtaatttcaatgctatgtattgtttgcattcaaaatgtaattagctgatttgttataaggttgatttctttgttagattgtaagaaagatgtaagtgttcatttatagaacatatacagggagtcagaattttaccccagatttcaaaaagcaagccatgtaaagaagtacatggagatgtcggctttaccctgaccacatgcattagtgtctgtaatggagggagaggtagttagaagattttaaggaatatttgggtttaaaaagtggaagatatacaacttcataccgagtaagctgcaatcgaaaagataaaacaggtgttagtgaggatatggggaaataaaaccctcatacacttctggtgggattgtaaaatggtgcagctgctttgaagaacagcctggccattttctcaaatggtgaaacatggagttaccatgtgagtcctccaccttagaggaatgaaaacatattcagacaaaaacttgtacgtgaatattcatagcagcattattcttaatagaaagtggaaaaagaaaacctcgcagctgcatcaactgatgaatggatagattaaatgtgttatatccatacagcggaatattatttggcaaggacaataaaatgaagtactggtagatgttacaacacggatgaaccttacaaatgtggaagctaaagatgtcagtccgtagagacagattagtggttactaagagttgggtgagtgattgctaatgtatacaaagttccttttgggagtgatgcatacattctggaattagatagttgtgatggttggactatgtgaccatattaaaactcagttgtcctgtttgaatgggtagattgtataatatgtgaattgcatctcaaagctgttacaacaaaaaatggatagagggaaaaagtgagaaatggaagtagaaatagcttaggaggagctgaaactacagttcagcttccttacccaaaaaatcccctatagtcttttcactcattggtatattatctgaaatgttatttcattttaaaatttatatattcaactcagttcctaattctgatctcaaccacaaagttgagattagttttagtttatgttatgaaagtgattgaatatttctttgtacccattccttcagttggtcaagaaattaattacaggtatagttttacaatcaaatatacttttctatatgataatctttatcccattaatttttatttttattggttacaattttaaaagcttactttctaatcaaacattctttaattttaattccgcaatacacaacttgctaaaatttattggagggaaccttctaccttccctgagtgtcactgtcaacatagctttatattcctttctgcaacttcatttggggagccgttgagttgatttcatcctatgggggaaaaaacaatttcctttacagtgttatttttctagaaaaagcttaaaattttatcatgtttctaacattttaatggtgatagaaaattaaaacttccaaaagagtaggcctattgaagaaaggtactctgccagacctactgctatctggcttggtacatcattgcattgctctaccaaagttcctgctattagaatttgcccgtttcctactgactggctcattgctgaagcctctgtttttcttaaacattgcattgcagtctccaattgtgttatatctatccaagttttgactaaagaagggatactgttttgtgacgtagaaagcaaatgggacttgcttctggctacctagaagcttatttcagcaggaggtaaatgtactgaacaattatagctgcatatttgttttcttgaagcaagcagtagaacaatgaaaatataacagttatgttttgactttttatctttcattttgctttatttggtgattgtgctataaaatgccactgtaaagatcaaattgatttaggataattaaaattgattaagtttgtcatatatttttaaaatgtgtaaaaagcttgaattatagcccaccatcaaattataaatcattaataaactgtgaaggcatttgcattcttttttttttttttttttttttttgagacagcatctcacgctgtcgcccaggctagagtgcagtggcatgatcactgcagcctcactgcaacctctatctcctgggttcaagcaattgtctgcttcagccttccgagtagctgggattacaggtgcccgccaccatgcctggctaatttttttttttttgtatttttagtagagacggggttttaccatcttggccaggctggtcttgaattcctgacctcgtgatccacccacctcagcctctcaaagtgctgggattacaggcatgagcctccacgcccagcctggcatttgcattctacttacaatgttgagtacttgtcttctgcaagttactagaaataacggaataagacagtcagattttaccattactgtctccagtggagacaataattttaggagctttattaaagcttagaaatactaatataatctatctgtacttccgaaaagtaatgcctgacatgtatacttacttttgttgtttgtagtgctaatcctccatctggaattgaagatgaaactgctgaaaatggtgtaccaaaaccggtaacataaggctttgaaatccagttactgatacaaatctttatcaatagcttcacagtttacatagaaagcaagctggcattttacattaccttcagtatcaggtgttatctggccctttcttacatctcctacttcatctggtgccatcaaaaacatatataggaattaaaatgaggaaaagaaatagtagaaagactgcagaggaaaatagtatgtgcaaaggcttgatgtttattgctttcaaggaattgaatggttataaatctactgaatatagtgagcctggttttcagagcaagttttgagcccacaacctttcactgttacgattttttaacgttgctttttaatgtatgtgacagtccctgactgcatgcctgcatgccattgatactttgtgaggtgaacatatcattggtcctatgaatatttgtgcattttaatcctataaaaggaaggaagttattgttccggaagtttgaagttgtatacaaaaaagtattttgcctatgtgatctacttatttactatgatgtgattaagcacaaaatagcctttaagagccaaagtaaaatcttcacaaatatagaatttgcatgtagggcctcttctaggtatacaagaataccaagaataactgagcttctacttaactatttggtacttcttatgctttggggtttttttttttaattctttaattgatttggtacattgtatttgtgacactgtgaatcttaaaattgttttcctcttagattcttttttgccaagacttctcaaatacttattttttataattttatcttgtaggtatcttagtaagttgctttagatctttttgcaagaggggcagatatgatagttaaaaaaaaaatgaggtgttgtttaccacaaggagatgatgccaaaaagatttcatttctttattcatagtcttatcctttttatcctgtagaacatcaaaattatgagttgaaataggtggcagcattataagcttgtaacttttaaattgtatctcaaaaaaatacagagtggggccgggcatggtggctcacgcctgtaattccagcactttgggaggccaaggtgggtggatcacctgaggtcaggagttcgaggccagcctggccaacatggtgaaaccctgtctctgctaaaaatacaaaaattagttgggcatggtggcgggcacctgtaatcctagctactctagaggctgaggccggagaattgcttgaacctgggaggtggaggttgcagtgagctgagatcatgccactgcactcaagccggggcgacaaagtgagagtctgtctcaagacagaagaaagaaaaaaaaaaacagggtggttactttttttagttattagtattagatgttgaaatggattactgaatgtattttataatttgtttatgttcatgtagaaagtgactgagaccgaagatgatagtgatagtgacagcgatgatgatgaagatgatgttcatgtcactataggagacattaaaacgggagcaccacagtatgggtaagttattttttagtaagtaacaattgtgtaaatgctatatagtaaggagagtgtgcctatatcaaactctcagtggttgagtccattgtttttacatttttctattttaacataaaagaacttgttaaagtttcatcatgaatatacttctttgctaaaatacagttaattgattaggcgaaggtacatagaagcagcagtttttgatgctgaatttaaagtgtttttataaaagaattgagtgctaggccaggcatagaggttcatgcctgtaatcccaggactttgggaggccgaggcgggtgaatcacctgaggtcaggagttcaagaccagcctgaccagcatggtgaaaccttatctctactaaaaatacaataattagccaggcatggtggtgggcacctgtaatcccagctactccagagactaaggcaggagaatcacttgaacctgggaggtggaggttgcggtgaacccagatcgagccactgtactccagcctgggtaacagagtgagactctgtctcgagaaaaagaaaaaaaaaaagtactataaattctttgattagaattagaaatccttaaattgtaatttgtatctgtacttattattatttcactttattatccagacctgagtttaggtttttaatttttttgcctaataaaaacaatatcaaaagtatttctttttgttcttaatagtgttttcaggtttctaattctcccttaggccttttaggccaatgtttgtctccaattttgtattctataaactggaccaagtaaatggactgtcattgactcattgagcgcataaagaatcttacagaaagattggaagggaaatacattgaagtacgaattgtgatttagttacgataggagaataagagtcaatgtgttttgtttttcaaattggctgtataatgtggttattatagcttatgcattggaaacataaaatacattaatttcactatagttcattaagcaacctcatctggaatcaaccagtatatacaaaaatattgttaaatattttattagtagagtcatttgttttcagaagtcatttcaggaagcttaaagccaattcagttattgtcatagtcagttttgtattataataatgactacccatgtaattttaaaatcctagcacctttttagggaacagagtaaagaggctgatttttcatgttaggggtggatattctaaatgtgctcctcattctcatttgggaaagtaaataattacttaatgagaaagttgggcttatactgtagtactagtaggcctttactatctgcatgatgcaaaaggaacacataaaattgtaataattgcatgttcattaaatgttatgtaaaattatttgtatttgcaagttatagaacaacttgaagcaaatgacaatttttttggattatggatgggacctttttttggtagaaattgcactcaaatattaaatatacgtggacttccatagtaccttactaaactttatttcttatagcaattttcagttttatgcattgtaattatgtttatacatatttattacctttacacacttcagatttctatagagtagaaaccattgaattcaaaactcttcaaaaaaacaagaaactgtgatttatggagttttctattcctcacattgccttaaatacagttaagtgtgcagtaaatggttattgactaaataaactgaatgttatttagttacagttgtctctgagggtttttccccttagacatttgattatgaaaattttcaaatgctcacaaaagttgaaggaattgacatgtgaatgctcatttacccatcacctagattatacaatctacattttgctttgtttgcttgaactcatatccctctatgcgtttacccatttatcagttgatttattttttattcattttatgcatttcgaaagtaaagtacaggcatttgtgaagagtgtaaagttgtttaacctctatatttcaaggtatatcccttgaaaacaaagtcagtgagaaaatgaaatttgataaacatttacttatgcacagcgttttcagaagcaaatttaaagaacaaactgtgtccaaggactgaattgatttattgtaaattgttaggaaatacaaaatagcattttttttttttttttgcgtaacatacctttgttacaagttcattttatatgtaagtaaggtatgaagaaaagcaactcttaaagtagaaataatttatcttggaaagtagtttgttacctatctctgtgagattgatccatttatgtactcaataaataatttttaaagacataatttatctggcactgtgttaagtagcaaagataatgtgcctttatcaaaccatctgtgatcattccattattattattgtttttacatttaccatgctacaaaagaacccttggtaaaatcaccatgaaatttcatggagttaacaaattagataaagttacatgaaagcagcaattttttatctgtgaatgtattaattgatgagaatacaggaagttattattttccagaggtagtgaggatgccagacatgtgagtaaatattttcagtgcaacataagtgctagaatagaaacatgtacaaagtgattcgaaaggtttgagaggagagttgctaaaagcctacaggtgttgaagagaagatcccagaggtaacatttgaacttgtttgaataatttttgagatgggagacagtggtttttaggtggaggacactgcctaacaataaatatattagatgcgtgccttggaggaagtacatggctggaggataaggtagatgaaaagagatggttgaaatcacttatggaaggagttaggatgcttttgctatgtctttgtagaccttgcaagcttgtccaatgcaccttattttgttgctgttgttgttctgttttgctttgttttagtcttttagctgcccaaagccatggtttttagtttctgtctccagtgataagtggaaaagaggggtgataaaggggctttactggcctaaccagaaacagaaactaaggactcatgactgtattctctcccttagacacccctaattaggtttttagacaggtcatatcatttgaaaagataactctagcatcagtagttgagatgggttagatagagagacattgactaatagatgtgaagtagttgtccaggtgagatgataatctagactaaggcagcagtagtagagagatgaatgggaaaatagtacatttgagtattagagaaacagaaatatagtcaggcatgtggtatacacctgtagtcccatggacttgggaggctgaggtaggaggattgcttgagccttggagtttcaggccagcctgggcaatatagtaagatcctgtctcaaagaataaatagaaacaaataacatgggtaactggttggttgtggatggaggaggagataaagggctcagtgacttaaagatttctagagcagttaattgggtacaggtgggtgctactgctcccacctcccacaaaacagattcatttgacatgtttattttggagttcctatagaaagtccaagtataggatctagcatttagagtggtctgagacttcatagggatctattggacattatatcaaatttgcctctgcaatttttcataccactaagcttctctacacaggcttctctacaaaggcttgtggcttaaaaaagaaaaatgatgttttaaaaggcagaatggggaatagaaagtagctaggtggaaagcgaagaagctcatttattgaacacttgtggctaagccttttataaaaatactgttttattctatacggtcctgtaagagaacagtttagagaaaatccttgatttttgtacatttgtagaaaaatcatgtacatcatatgtagataccgctaagtcactttttctgaatttggattgttaaaatgtaaacatcgtgaaggcaggaaccgtaattgtccagctcctcatactttttcctcagcctagaaccatacttgacatggtttggtgctcagtaagcattacatgaattaatcagcctatgaaatgattatttcaagttggtgacgatagtactgcttgacagtagtaatatttggtccactttgtaatttttgcatttctagctgtggagctacagttatttgatacaattaaacattttattgaatttacatttttcttttttaagtagaaaagaaaagtgacagtgcaaatgtaactaaacctaagtcttaaatgtagtacatcagagacaaaagatggaagtaattattattagacccaaagcagtgaatctgaagtccagatggctgaagttctgagagaaaagaaccaaatatataacatgaatataatgtgagaaatatatcattataaacatctgtgacttgaggtcttactgatatctttttttttttttgagatagagtctcgctcttttgcccaggctggagtgcagtggcgcgatctcactgcaagctccgcctcctgggttcacgccattctcatgcctcagcctcctgagtagctgggattacaggcgcccacccccatgcctggctagttttttctattttttagtggagacggggtttcatggtgttagccaggatggtcttgatctcctgacctcgtgatccacccgcctcggcctcccaaagtgctgggattacaggcgtgagccgccgtgcccggccgtcttactgatatgtttttgttcagtgggagttggtccttctttgcccattcccgttttcttctaacttccctagtaacagaaaagtctcttttaattagtatatttgataatactactcatatataagaatccattatataaagaagtaaagaactgtctgtaaccccgtattacagaaaatgtatacaaggctcatttatacaagtaaaaatgcaatgaattattcaaataattgtatacaagtcttaggtgttttggccaagattacacaactagcaattgacaaaacatttgaatgtgggttggtccaacttcagatatttttttctttatcactgtgtattatattacatctaaaaaggtgcagcttaatattttttcaaatatatacattcatgtaactacagccagatcaagatatgaaacataattggcatcctagaagtttctctcattttgcctcttggtcattaaccacccaccaccggcaaacactgttctgctttcatgctagacttatttttgaatttcttgtcaataaatttctgttatggactgagtactccatgaatagttgaaaaaggatttattaacaatatcaaatgcaagaagaactgaaaggccactagatttgacaacaagttggaggaattttacttatgcttaagagtgctgtatatttaataactgggaggcaaggaaatgaagacaaggggtgtaaactatttttcccttcttagccttatttcttgtgaagtttgttacagtagaatgttgagttattggcaaaaaggtttttgaaatggaaacaagtcaggctttttttttttactgtttttgccttttattgagcaagtgactttaaaaatcagtttaaaatgttttttaaaatatgtgttagctgggcacggtggctcactcttgtaatctcagcattttgggaagccaaggtgggaggattgcttgagctctggagttcgagaccagcctggacaacatggtatgagatctcatctatacaaaatttaaaaaataaagatagaaataaaatgtgtgtcacactatccatttactatgtgattgtataatttgtttgtacaaatggaatatattactgttttgtttaagcttttcaggataatttctgtttttttttgtttgtttgtttttaggagttatggtacagcacctgtaaatcttaacatcaagacagggggaagagtttatggaactacaggtaaaatttgtattttctgttgcatcaatagggaaataaggcacatatcttaaataggtcttaatagcttttttttttagtcggggacagagtctggctctgtcactcaggctggagtacagtggcgcaatcttagttcactgcaacctccgtctcctgggctcaaaccatcctcccacttcaccttctcaagtagctgggactgcgggcgtgcaccaccatgcttggccaatttttgtatttttatgtagagaccaggtctcaccatgttgttcaggctgctcttgaactttcgagcttaagtgatctacctgccttggcctcccagagtgttgggattccatgtgtgagccactgcgcccggccaaggtgataatagctctttttaaagagtaatttttgaccgtacatcacagagactggtaaagtttttctggcaagagtccagtagcacgtattttaggctctgctttgtttggaacccttgccaggttttttgccaggaatagtaaaaagatgtttgttttctgtttgtgtgtgtatatgtgccaggaatagtaaaaaggtgtttatattttctgtttgtctatggtatcgcctggcttcttgcaagtatagctccttcattttgtaattttataaaacagggacaaaagtcaaaggagtagaccttgatgcacctggaagcattaatggagttccactcttagaggtagatttggattcttttgaagataaaccatggcgtaaacctggtaagattattgtggattatattaatttcaatattttcagtgtgaagtcatcagaaaatttttttgaacatcaatttagaattttattttttcattataattttaattgtcttaagcaaatgatgagtaataatgacttgggattattaaatcttactggtggccttgtattacttaaaatgtagacttattgtttattataatggcgtttgtaaagggaataatttgatcaaaaatgatatagtctttttgccaccataaatgatagagtgataactgatagaactctaaatttatatttttatagtttagtatatttttgatgctgcataaaaatagagctgaaatatttgtacactaaagttgtgttttatctttaggtgctgatctttctgattattttaattatgggtttaatgaagatacctggaaagcttactgtgaaaaacaaaagaggatacgaatgggacttgaagttataccagtaacctctactacaaataaaattacggtaattaataaatactccggaatacccttggcttgtctaccgtcccacttttactccccaaataaatcgcttccctataaaagtggttaaatgctatatgatagtttaaaaattccattttgtttaccatgtttgtttttcccttccctcccttttagagtttcgtatttaatgattatctgatgttcttactttcaaatcacagactagccacagctagtttgtctttatatggcctattaattaaatattatgtggtatcttaatggggaatatgttatttaacttaggccgaagactgtactatggaagttacaccaggtgcagagatccaagatggcagattcaatctttttaaggtgaattttagtaaattatccttggttgctctcattttttgttcttgagtctgctcccatgccactactcaagggacaagattaaagtggaaatagctaccttttttccaaaccttcagcttcctggtgacttacaaatttgctgattgttgttttatctccacttttgcaagcatgtgaatttatagcctattatactaacaaatgccgagtaaaactattgtttgctatatgttgtgatttcattttgagtcgtaatacatgtttgtaggatagaaaagttagtggcaacagattatgctctcattgtagataatactctaatctttatcaacagaattggaaacttttttgttctctttaaaaaaatggtaaggaaggtggcatactgtttatctctatgacacttataacactgatatcattggtgtaatgccctgatagctcaagatatcttcaaaaatcttaggcattctctgagaggctttaagaactcaacataatgagatactgccattgattttaaaaatttgttcttaaaaggagtaggtttatgtgagagactttgaggttgatactacaacttgtataacaagtctgatttctggcttctccattccatggtatgatcacagacccagtccaaagaataatactatattgtcatagttcttttatggaaaactgattgtgtactcttttttctttaccttaatagttgactcttatattgaatgacactgggatgaagattgggagtggcttttagattgggttgtatactcagggaactttagtggactggaaagagaccactgctccccttttgggtttgcagccctgtccaccagaatactgccttatgcagtgtgtgtgctatgtctgcagatacaaccactctactgtacacagttctatatagataattttattttaatttacatcctactttgcgtaagtatttggttcttcttttgcaaatattttgaaagtatgtgatgatgtctgttgtgttttaaagggtcatcagttttttctgggttatattgtctatataggcattgaatatattaaacttgactgcaatgggtagaaaagttgtcttaatgaactagttcattagcagcagtgcattttattttcttttaatagaaatgagaactgccatcataaactgttagcttctgtatacttcattttttgtagtagacttaaaaagagaataaaaagaaactcctaggggtcagtctcattgaaggtagccgttatgaatgtgtattttatatacatactgtgtactgaaaaatttattttgaagtttcttttggctatgtgagaggaggtcatagagtattccattctgattggattctgaatgaaagattttaattcgatgggtacagtcttcatggttttcttgccttgatagtgtgtttaaatactaatatgtttggtagaaatactgatttgggaatagggtgtgtattaagaatatgtgtggcaaacattttttctttatgtatattgtggtccgtaggaaatggtggaaatagggccatgatgagcaggacattgattttaaactaacctgcaaacatttgtgtagccaataggaagctgtttgaaagttcctgagcagtagaatgaagtggcagatctggtatttagaaaaggaactggcagcaggatgggctgtagaatgaaaggggtgtgaaacagatagggagctgttgccatactatgggactaaaatgaactagggcctgaactcacttatgaggatgaatgggcaaaggagtggatttaagaattaaaatttattttcatatctgctgcaaatagaattttttcatccttaagtgtgagacagcccatcagcctctttaagataactttatttacttttcattaaacaatttgcaaacccagtaacaagtagaatagtacacatgaacccttaggtgcttatcatacagcttcaacacttaacagtgttttgacattcttgaggtaacagccttttatgtacttcaatatgaataaagtttttttaaaaagcaaaataaaagaaatttaataggtataaaaataaagccactcaattgggtacaaaaacaattgtgtaattatttaattagagtgaatggcaagagagaagtgactagtgggaatagataacatgtatgtatgagaaaacgttgactacaacgttttcttaaaatattttttattcatttgtgcacatatgcatagattttccccccggcccccccccccccccccgcccccggctgtgaatgtatgagctttgtcaccagttttctgaaattttacagttatgtgtcttggtctgttttcatccattgtaccaagcattctcgatttggaagcacatatccttcacttatggaacactttcttcttttacttttttctctgctttcttttctattctagataatattggatatcttcgaatggtcttctaattttttttattgtttttctctttttcatcttttccattatctgggagaattttttattcttataatgttattgtacttagttttcatttctgttgttaatttccaagaaaatttttctttattatttagttgtagcatcttattattcatgcctacagtaatgcaatatctttttccctcctctctcaaaggatattaatgataggctgttttgtttctgttagatttttcttttcctgcatagtctgttttcaacttgattatttaagttagttatttttatcttctgacttagacttttctgaaatgtttgttgattgttggccattcactcatgtaacggtgggctgctaaaattgattggaagctctgtacatctgaatagaacttgcttgactgcaggcttcactggagggctgttttttcacattccctgatgtcagtatttttaggtgtttttctttttgtggtaatcagattttttcagataaggtattccagtattctatctagagggtatatacttggctgatgcaaatgttctggtagctggagcttttaatttctgaatttttgagggtcctgacatgataatcattgtctttgctttctcatcgctgacttaggattcagttttctttggtctgctcagtcagttactattttttaatctaatttcaaagttctaaattttgttgctttctcagtttttttcttataggttgaaacaaaattgtgataatttatttatggttgtctgtttttcctttttttgactttaacatgtaatgttttcataagttcttaaatttttttataaatataatttaaaatagctacatagtttattatttggatgcaccttagtttacttaacaagggtttttttttaagatattgtttgtaaagttaaacttttacaaatgaagctgtgataggcagccaaaggaaatttcaaaaatatttttcaaacttttagtacagtggtagcataatttgggtgagtatttagcttctcaaggttgtagacttaagttttgtttggatttgtcagatctgacataaatttgtttttagaaaattagtcataatgtcttatggtcatttcttaagatattaggtcatgtgaaataatctcattatgttactggttagacaaattttgagtgtgtaatcttgagtgtaacatctgaagacaaacaaatggataatcaagttgactagaaaggttgctagaatagtgaggattttcagaattgtttaatagaatgaggatattatgaagaaattaaggaaaaaagaaaagctgggaaacacgggcaatttttgtgtgtttaaaaatctatgccattttcctaatatcttctctgaccccacctctctctttctcttttaatgtctctcccacgtctctttccccaatccttcccggttcctccttcccggtttttaattgagcattgactgtgccaggaagtaccttaggctttggggggaaggggaggtcaccataatagacatggagcctatagtctaggcatttattgtgcttaatgggaaaatttaggtattaattaaataatcatgctaaagatgatatagttataaactacatgttctttggagtttgaagaagtgacatttaagttgattcccaaagacagtcaagtaacaaatacttattgagtacttattgcatgccaggtactgttttaggatgagacatagtaataaagtgatggaattttgtgtgtgtgcgtgtgtgtgtgtatgtgtatatctacgttaatttttctgatttcttatttatatatctcagcatcacagggttgaaaagcacctcaacaaatcctattagaataatgagcactcatcttgtggatatagatatcaccctgagtaggccttaattggcataactgtattttatgatttttttttttttcttgagacagaatttcactcttgttgcccatgctggagtgcaatggtgtgatcttggctcactgcaacctctacctcctgggttcaagtgattctcctgcctcagccgcccgagtagctgggattacaggtgtataccaccacatctgtatgttttttgtatttttagtagagacagggttttgccatgttggccaggctggtctctaacttctgacctcaggtgatccacccgcctcggcctcctgaagtgttgggattacaggcgtgagccactgcacctggccacaactgtattttagatgttaactttaagtaggccttttaaaggaattatctatacaaagcaatcatggatgtaacagaacttcaaaggaaataaaacattggctttttataattacaattacatggtgagaaaaagattcaaaagcaaatgtttctatgttgagataaaatgaactacaattagaatctttttttttcccaagatggagtcttgctctgtcacccaggctagatagagttcagtggcgcgatcttggctcactgaaacctccacctcccgggttcaagcaattctcttgcctcagcctcccgagtagctgggattacaggcgcctgccaccacacctggctaatttttttagttttagtagagatggggtttcaccatgttgtccaggctggtctcgaactcctgacctcgtgatccacccacctcggcctcccaaagcgctgggattacaggcttgagccaccacgcccagcctacaattagaatcttatgctttcttttacaacctcaaatggacagtgctcataaaattaaaaaatcatgctttcataaacattaaaacctgtcataaaattagtggcaattaataggctttcttagtctctctatataaataaccagtgaaccatttattttctccctgttgtgcaaagccaagtggtcaatgcagttgatttcagattgagcattttttaacaaaattattgaagcatacacagacttaatacttttggagaattatggagtatgaaaggaaaattttgaactctgcagtttttactgctagagagttctaagacattcaaagttatttttctttttaaccgatgaaagaatgtttatgtgcagaaaaagatgagatatttttgttgaagcaagtgattgtgcttcagactggaatccttttgaattcatgttgttttccctgtaaagagaaaccaggaagaagaaaatccgatgacactaatacatcatcccagatgctttcaaaggattcctttttgtatgggaacttataagcaatcacactattgccataatgagattcttttgggtggttgagtagctttccttcattcctcttctggtagactcagtaaaattggctagagagatcagtgatcaccagagagtgagctgtgtggctagagcttgaatccaagtggtccaaaaacaccgtttttattcttatcccctctcaggagaatggtactcatgaatggagtggcatgcatcttctctgaaggcaggatgtctgtgctgttttcttctcatggctaaattaggtagtctctgtctgttgataaaaaggctcataataaaaataaaaaatgcaaaaaggaattgttgaaatctcatttctctgccacacataagtgataacctctcagtgtaaaccaaacaatctgtaaatagtctggaatatctgtgtgacaaatgacaaacctcagagtactgccagctgtgttttccaggagggttactgatcgcagattggaatttggcatatattgtaaagttgacatattgggtgttcatatgtattagataatttctatggttctttttttccttgagcagctcagtagatgatggtgccatttatttatatggggaagacttgtagaggatcagattaggggaaattagtagttttgttttggccatggtaactttgagatgtctgttagacatgaaagaagttacatagaaattactggtggtcaggggagcaattcggacaatagtgtcaactctgaatattccttgacatccccaggcagaacaatgcgtttctttttgtgttattataacatcttttatcctttagatttttttcataatatttattatattgctctgattgttggtgtgtttgttttttcctaaggtccaggatcctgttgtgtttctatcagcttctggtacataatagatattcaataaatgatgtttacattctctcaccagatcctgtcagttttacctgtcaggtatctgtcaagtccatttctttctgttcccattgccttagtgccgattctcatcatctcattagaatcagggcatttaaaaatttttttaagtggtagaactcattttcaaataaactaaatgtaagatcctcattatatgagagtatcaattagagattgggttggacactattaataagagagctatctgactataatggctcaagtgtaaaagagtttcttttcttcacataatgattagttgggaggtagatgattttggaattgaattggtggttcaaatatatcagtcaaaatgtcttgagattctcttggcctttgcctcatgggaaaggagagtgatgctgaatttaaatggagcagggaatttaaatagaatttaagtagaacataaaatatggtgtgatattatttaagtgtaaggaaacttgaatttgtttaaattgaatagtttgatgataattttaagataaaaaggtgagtataaaagcagaagagcataaagaagtcatttcaacagactagaggaatgtgactgggctacaatcaaaggatctaataagagcagaaaggttaggcaaatcttggagaaattatggagtaagtagatagatggttttaaaattaatattaagagggagaaggctgggcctggtggctcacacctgtaattccagcactttgggaggctgaggtgggcagatcacttgggacgggagtttgagaccagcctgggcaacatggtgaaatcctgtctttactaaaaatacaaaacttagccaggcatggtggtgcacacctgtaatcccagctactcggggggctgtgaggcaagagaatcactttaacccaggaggtggaggcttcagtgagccgtgattgcacgactgtactccagcctgggtgacagagtgagaagaggtattaagacagatgattaacttcaagcttttaagcctactgaactgtcaggatgatggtacttttaatggtgatgggaaaatgggagaaattgtatggatgtacagtagcagattattcacatttgtgttacaggaaatcacagtctgaatagaaaatggtcagaatggctaaaatggtcacctattgttttcttagaataagggtggtgaacacagaacgggaaaattcttcaaggtctttcttgaattcgaaacatgaagtcataaccaagtatctgggacctatttgtagtgatctgcaggaatttatgaaagtgccaaagaattaacagtttattcggcttctaagtgttattaatgtgaactttttgatagttggaacattttgatcccatactctctttggtgcctttcacctaatactgttctaaaataggctaattttaataaatattcagcaaaggaacattcttagtgtttaacttcaaattaaatgttgtaaacttattttaacatctaaagtccattatgtttgagtgttctgttaaattcaacaagctaataaccttttttttttaaggtacagcagggaagaactggaaactcagagaaagaaactgcccttccatctacaaaagctgagtttacttctcctccttctttgttcaagactgggcttccaccgagcaggttagttacatagttataactcaattactgtacgacattggtatctttacattgtatttgtgctatattaagtataaaagctctgaatgttttaccaaaaaactggaacattttactttggtttagtacaaaatgaattcttcacaagaaacttcttgatgtttttccatctaaaaagcctagggtaagcaagaagtgaagtgcggtatatagttttgtgtatgaataaagagacaatcttatattcaagagaggtgaataaagagacagtcttacattcaagagaggtggtaacagtagtatttgctgtttcctgtgctccctattcttacataaagaattattggacttctaagtctagatctattggcctgaaggtcttttgctaattgtagtgaaagaggctattgaaatttcagcttggaaaatctttaaaattggaaccatttgttgttgttgtttgattttatatgataatacctcatatgttcccgaaggtatcagatgtaagaggcaaatatgctagaaaatgtcttttttacttaaatgtgacaaatggttaccctattatgccattaccaggaaactggtaaaggatagtaggctaagactagcgaagtttgaggtcagtagtttaatcttggactagataagatgactaaagtctgggcctgaaacaaattaataacccaactattactagttctcggccagatcacttaccttttgtgttactggtttaaatttattttatatagttttctgtttttgttattctacagttttgtattgttataagagacattttagaataatctaatgcaggaagagactttatagtggcatctagtctagctctaagataacgattcttgaagccttcagccaaaattaaatggcataaagtgatccaggatttttgtgaattgtcatagacataatgaaatgtgattatttaagctaaatataatctcaaaatgtttggttttaaagaatttatgacagctaagctttaaatatgtagtaatatataatattgtaatatgtagtattcttttggcttatacattttttaagaggttaactttcattcattgagtttatggtattctgcagtatagagtgatggtaacagcttggactctggagtcagatttctggagttcagatgctggctctgcggcttactagctgtgctgtcgttgggcaaattctctaatcttatgccttgatttcttaatctgtaaaatgtagtaatagtacttccctcacagtgtagttatctatattcagtggattcatttatgtaaagtgttttagaacagtgctggtacctagaaaatactctagatgtttgctattatacttaaactatttaaaaatcaatagtttttctgtactttgccttttgtttttttattgttgattggcctttcaaaatttgggccagattatgtaagggctgtgtgccattataaaggctttggcttttcctataaattaaataaatggggactcactggcggattttgagcagagcaatgaaataatctgatttaggtttgtaaagtttcgatttagtcgctttactaaaaacagactacagagttacttagggtgggtgaaaacagggaggccagttaggaggttgcagcaattatctaggcaagagataatggtaacttggaccaagataatggtgtggagatgttgagaagtagtcagataccagttatatttcagaaggtaagccaatagcctatcttgatggattggatgtagattgtagaggaaaaagcagttaaggatgaatccaaggtttttgttctgatcaactgaaccagaatgatggttttgtcatttacagagatggaaaagaccataaggaggagtggttattggaggaagaagaccaagagttcagtgtagaatataataaaaatgagatgcctattggacgtgcaagtgggaaatttgagtaggaagttggctatatggatctggagtagaagggaagagtatgggctggagataatgaatttaggataatcagtgtttaatattacttaaatgaaactacaaaatggaattagaccataaaagaggtaagtattgatagagaagtggtaagagacagccttggggcactcccttgtatgtcaggaaaataaggattaactagtaagaggagaccattaataaggaggaatgatgaatgaagtaggaaaaaaacccactgtatgtcttgaaaatgatgtgtttcaaggagaaatgtcagctatcaaatactaaatccaattgattggtcaagaaaatgaagactaagaatgaccattggattttattgatggtcattggtgatcctgaccaggatcattttcatttgtataaaatgaagataaaagactttggaatggattaaagaaagagtgggaggaaaagaattagaaagagaaaatatgggcactttttggaagactattttctttctgtgggggccagagaaatgtgacagtatctggagggaaatgtggggtcaggagaagttttttttcaaaacaaagaaaaaaacagcattttggctgggcactgtagctcatgcctgtaatctgagcactttgggaggctgagatgggcagatctgttgagggcaggagtttgagaccagccttgccaacatggcaaaaccccatctcaactaaaaatacaaaaattagctgggcattgcgaagcaaacctgtagttcaagctactcgggaggctgaggcgggagagtcacttgaacccaggaggtagaggttgcagtgagccaagatcacaccactgcactccagccttggcgacagagtgagacactgtctaaaaaataataataattacagcattttgtatatttatgggaatgagttattaaaggagaaattggtggtgtaagacagggaagttgtagaggaatgtcgtttaataaagccaaagggatgagatgtaatatgaagtagagaagttgcccttaagtagaagcatggaccgttcattcataagaacagtaacgaaggcaggatacagggcaccagtgcagatgggtaggtggataatggaatgggaataattgaaagttctcttctgattgctttcatttttcccggcaaaataatatgcacacttatctggtgagagtgaggctgttggaaataagaggccattggaaggtagcattgagtgtttgagaagaaaagaggtctgaaatagttttttggagttctgtgaataaactaggtgaaaggagtagctgggcagctggagtgaagtgtggggtcaagagaaaccttttttttcaagatgagaggaattacagtatttttatatgctgatgggaatgagttaaagtaaaaaattgatgacacagggagagaaactgtacagtactactttcttatctaggttttgctttccttggtttcaattacctgtagtatgttacaataaggtattttgagagagaccacattcatacaacttttattatattagattgtttttagattggtgtaaaagtaattgcggttttggactgtgaaatttaaatcataactaggctcaaacacatctttattaatcaaaatagaaaccattacaatcacattttttgccaatgagaaataagtttctttattcctgtagtgtaaaaatccgtgcttcggatttgacaaactcttggaaagcattttctgtatcctgctgattgtggaagtgttttccctgcaaaaagttcttaagatgcttgaaaaagtggtagttgggaggcaggagatcagatgaatatggcggatgaggcaaaactttgttgtccaattcattcaacttttgaagcattggttgtgcaacatgcggttgggcattgttgtggaggagtattgggctcgttctgttgcccaatgccggctgcaggcattgcagtttttggtgcatctcatcgatttgctgagcatacttcttagatgaagtggttgtgctggtattcagaaagccgtagtggattagaccagcagcagaccaccaaacagtgaccatgatctttttctggtgcaagtttggctttgggaagtgctttggagctgcttctctctccagccactgagctggtcatctccagtcatcgtataaaatgcacttttttttttttattatactttaagttttagggtacatgtgcacaatgtgcagtttagttacatatgtatacatgtgccatgctggtgtgctgcacccactaactcgtcatttagaattaggtatatctcctaatgctatccctcccccctccccccaccccacaacagtccccagagtgtgatgttccccttcctgtgtccatgtgttctcattgttcaattcccacctatgagtgagaatatgcggtgtttggttttttgttcttgtgatagtttactgagaatgatgatttccagtttcatccatgtccctgcaaaggacatgaactcatcatttttttatggctgcatagtattccatggtgtatatgtgccacattttcttaatccagtctgtcattgttggacatttgggttggttccaagtctttgctattgtgaataatgctgcaatagacatacgtgtgcatgtgtctttatagcagcatgatttagagtcctttgcgtatatacccagtaatgggatggctgggtcaaatggtatttctagttatagatccctgaggaatcgccacactgacttccacaatggttgaactactttacagtcccaccaacagtgtaaaagtgttcctatttctccacatcctctccagcacgtgttgtttcctgactttttaatgatcgccattctaactggtgtgagatgctatctcattgtggttttgatttgcatttctctgatggccagtgatggtgagcattttttcatgtgttttttggctgcataaatgtcttcttttgagaagtgtctgttcatgtccttcacccactttttgatggggttgtttttttcttgtaaatttgtttgagttcattgtagattctggatattagccctttgtcagatgagtaggttgcgaaaattttctcccattttgtaggttgcctgttcactctgatggtagtttcttttgctgtgcagaagctctttagtttaatgagatcccatttgtcagttttggcttttgttgccattgcttttggtgttttagacatgaagtccttgcccatgcctgtgtcctgaatggtaatgcctaggttttcttctagggtttttatggttttaggtctaacatttaagtctttaatccatcttgaattaatttttgtataaggtgtaaggaagggatccagtttcagctctctacatatggctagccagttttcccagcaccatttattaaatagggaatcctttccccattgcttgtttttctcaggtttgtcaaagatcagatagttgtagacatgcggcattatttctgagggctctgttctgttccaatggtctatatctctgttttggtaccagtaccatgctgttttggttactgtagccttgtagtatagtttgaagtcaggtagcttgatgcctccagtttgttcttttggcttaggattgccttggcgatgcgggctcttttttggttccatatgaactttaaagtagttttttccaattctgtgaagaaagtcattggtagcttgatggggatggcattgaatctataaattaccttgggcagtatggccattttcacgatattgattcttcctacccatgagcatggaatgttcttccatttgtttgtgtcctcttttatttccttgagcagtggtttgtagttctccttgaagaggtccttcacatcccttgtaagttggattcctaggtattttattctctttgtagcaattgtgaatgggagttcactcatgatttggctctctgtttgtctgttattggtgtataagaatgcttgtgatttttgcacattgattttgtatcctgagactttgctgaagttgcttatcaacttaaggagattttgggctgagacaatggggtgttctagatatacaatcacgtcatctgcaaacagggacaatttgacttcctcttttcctaattgaataccctttatttccttctcctgcctaattgccctggccagaacttccaacactatgttgaataggagtggtgagagagggcatccctgtcttgtgccagttttcaaagggaatgcttccagtttttgcccattcagtttgatattggctgtgggtttgttatagatagctcttattattttgagatacgtcctatttacatacctaatttattgagagtttttagcatgaagggttgttgaattttgtcaaaggccttttctgcatctattgagataatcgtggtttttgtctttggttctgtttatatgctgaattacatttattgattttcgtatattgaaccagccttgcatcccagggatgaagcccacttgatcatggtggataagctttttgatgtgctgctggatttgttttgccagtatgttactgaggatttttgcgtcaatgttcatcagggatattggtctaaaattctcttttttggttgtttctctacccggctttggtatcaggatgatgctggcctcacaaaatgagttagggaggattccctctttttctattgattggaatagtttcagaaggaatggtaccagttcctccttgtacctctggtagaattcggctgtgaatccatctggtcctggactctttttggttggtaagctattgattattgccacaatttcagagcctattattggtctattcagggattcaacttcttcctggtttagtcttgggagggtgtatgtgtcgaggaatttatccatgtcttctagattttctagtttatttgcgtagaagtgtttgtagtattctctcatggtaatttgtatttctgtgggatcggtggtgatatcccctttgtcattttttattgtgtgtatttgattcttttctcttttcttctttattagtcttgctagcagtctatcaattttgttgatcttttcaaaaaaccagctgctggattcattgattttttgaagggttttttgtgtctctattttcttcagttctgctctgatcttagttatttcttgccttctgctagtttttgaatgtgtttgctcttgcttctctagttcttttaattgtgatgttagggtgtcaattttagatctttccttctttctcttgtgggcattcagtgctataaatttccgtctacacactgctttgaatgtgtcccagagattctggtatgttgtgtctttgttctcgttggtttcaaagaacatctttatttctgctttcatttcattatttacccagtagtcattcaggagcaggttgttcagtttccatgtagttgagcggttctgagtgagtttcttaatcctgagttctagtttgattgcactgtggtctgagagacagtttgttataatttctgttcttttacatttactgaggagagctttacttccatctatgtggtcagttttggaataggtgtggtgtggtgctgaaaaaaatgtatattctgttgatttggggtggagagttctgtagatgtctattaggtctgcttggtgcagagctgagttcaagtcctgggtatccttgttaactttctgtctcgttggtctgtctaatgttgacagtggggtgttaagtctcccatttttattgtatgggagtctaagtctctttgtaggtcactcaggacttgctttatgattctgggtgcatatatatttaggatagttagctcttcttgttgaattgatccctttagcattatgtaatggccttctttgtctcttttgatctttgttggtttaaagtctgttttatcagagactaggactgcaacccctgcctttttttgttttgcatttgcttggtagatcttcctccatccttttattttgagtctatgtgtgtctctgcatgtgagatgtgtttcctgaatacagcacactgatgggtcttgactctttatccaatttgccagtctgtgtcttttaattggagcatttagttcatttacatttaaagctaacattgttatgtatgaatttgatcctgtcattatgatgttagctggttattttgctcgttagttgatgcagtttcttcctatcctcgatggtttttacagtttggcatgattttgcagtggctggtactggttgttcctttccaagtttagtgcttccttcaggagctcttttagggcaggcctggtggtgacaaaatctctcagcatttgcttgtctgtaaaatattttatttctccatctcttatgaagcttaatttggctggacatgaaattctgggttgaaaattctttcctttaagaatgttgaatattggcccccactctcttctggcttgtagagtttctgcggagagatctgctgttagtctaatgggcttcactttgtgggtaacccgacctttctctctggctgccctgaacattttttccttcatttcatctttggtgaatctgacgattatgtgtcttggagttgctcttctcaaggagtatctttgtggcgttctctgtatttcctcaatttgaatgttggcctgccttgctagattggggaagttctcctggataatatcctgcagagtattttgcaacttggttccattctccccgtcactttcaggtacaccaatcagatgtagatttggtcttttcacatagtcccatatttcttggaggctttgttcgtttctttttattcttttttctctaaacttcccttctcacttcatttcattcatttgatcttgcatcactgataccctttctttcagttgatcacctcggctcctgaggcttctgcattcttcacgtagttctcaagccttggttttcagctctgtcagctcctttaagcacttctctgtattggttattctagttatacattcttctaaatttttttcaaagtttttaacttctttgcctttggtttgaatttcctcccgtagcttggagtagtttgatcgtctgaagctttcttctctcaactcgtcaaaggcattctctgtccagctttgttccgttgcttgtgaggaactgcgttcctttggaggaggagaggcactctgctttttagagtttcgagtttttctgctctgttttttccccatctttgtggttttatctacttttggtctttgatgatggtgatgtacagatgggtttttggtgtgggtgtcctttctgtttgttagttttccttctaacagacaggaccctcagctgcaggtctgttggagtttgctggaggtctactccagatcctgtttgcctggataccagcagcggtggctgcagaacagcggattttcgtgaaccgcgaatgctgctgtctgatcgttcctctggacgttttgcctcagaggagtacctggccatgtgaggtgtcagtctgcccctactggggggtgtctcccacttagactgctcgggggtcaagggtcagggacccacttgaggaggcagtctgcccgttctcagatctccagctgcgtgctgggagaaccactgctctcttcaaagcagacagggacatttaagtctgcagagattacttctgtctttttgtctgtgccctgcccccagtagtggagcctacagaggcaggcaggcttccttgagctgtggtgggctccacccagttggagtttcctggctgctttgtttacttaaggaagcctgggcaatggcgggcgcccctcccccagcctcgctgccacctggcagtttgatctcagactgctgtgctagcaatctgcgagactccgtgggcgtaggaccctccgacccaggtgcaggatataatctcctggtgcgccgttttttaagcccattggaaaagcgcagtattagggtgggagtgacccaattttccaggtgctgtctgtcacccctttctttgactaggaaagggaactccctgaccccttgcgcttcctgagtgaggcaatgccttgccctgctttggctcgcccatggtgcgctgcacccactgtcctgcgcccactgtctggcactccctagtgagatgaacccggtacctcagatggaaatgcagaaatcacccgtcttctgcgtcgctcacgctgggagctgtagaccggagttgttcctatttggccaccttggctccatccttaaaatccacttttcatcgcacatcacagtcagatagaggaatggttcattgttgcatagagtaagagaagacaacacttcatgaggatgatttttttgattttcggtcagcttatgaggcacccacttaactgagctttttcacctttctgatttgcttcaaatgcctaacaactgtagaatggtcgttgagttcttcgacagcttctcgtgtagttgtaagaggatcaacttcgatgattgctcttagttggtcattgtcaacttccaatgaccagccaaggttctcgtttcctttgtaaaacttctggaactaccactgcactgtatgctcattagcaattcctgggccaaatgtgttgttgatgttgcgagttgtctctgctgctttatgacccattttgaacttgaataagaaaattgctcgaatttgctttttgtctaacatcatttccatagtctaaaataaacataaaataaacagcaagtaataagtcattagcagaaaaaataaagaaataaaacgagaaatgcccattaacatgatgtgtaacataactatttgtttaagaatgtattccagtatcaaactgcagatcccaaaagtgcaaaaaccgcaattacttttgcactcacctaattgttctcttttattattgttaatttcttactgtgtttaattataaattaaattttataggcatgtatatatagaaaaaatcattgtacatattgggttcagtaccatcctcagtttcaggcatccactggaggccttaggatatatcctccactgagggtcttagaatgtatcccccaagaataaggtggggggggctgctgtatattttcaacttttcttgaaattaatggccatgggtttaaagtgtgacagtcttgtcgctgctttttgggtgtttctctgactcttgttaggtatatgagtgtttatgaaggttagctagagttggatttaacagaggttgatgtatcagggaattataaaaaagggatgaaggggacaggtacatgagcatttacttgagggagttattgtaatgatgggccattggctaagaagagatggagggcaaatataggtaagggacagctgaaaggaggtaaagaaaggatggaaaaattagcagggctatcactactaaaaaacgaaaaatgaataattaccactgctacctataaaagttacctaagttgtcaatactgtcactttcgtacgtaaaggacagtagccacaactcattaggaaagtttgttttctggattccatttgataaaaaggatactttgcagtcattgtgaaatatttcccataaaagtattttttttgttttattcgttatatttatggagattggatagacatctttgaaagtaaaattgtattgaccttagggagaaaacagtaaatgttattcataaagatataatacagggtgcacagtagatgtttaagactaatgagctgtgctactgacctaagcactgtatttccattgtttacaatcttagattgccttattaatgtatatgtaagtgttgatatgcttgcacagaacttttaaaaatattttttcgtactttatcaatagaaatgctgggtttccaacgttctgtagtacccatcaaattggcactgttaagtaaaattttatatttaatatatcagaatgctttgcttaatctttaaacgttagcatcttaactttttgtgaaatacatacatacagaaaagtggcatatcaggaatgtacatcttggttaaatttttacaagctaaacatacttttgtaaaccaggatatagactgatagaacgtttttattacccccaaaagtccccattatgcctccttcatttgttgttgtcattgaaaaaaataaagttttattttgaaaaaaatttaaacttacaaagaattgcaaaaaaaagtacaaataacttccatatactgtatccagattttccagttaataacattttgtcatatttgcgttataatttctcaaaaacatttttcttactgagccatttgaatattaattgtaggcatcatgcccctttacccttaagtacttaagcatgtatttcctcagaacgaggacattctgttagataatcatacggcagagttatcaaagtcagaaaatctaatagtgaatcagtactttcatctaattgcaggctgtaaattttgcaaattatcccaatatcctttatggcaatgttttctttcttcatggatttaggacttaatccagtgtcacgcgttaaatttaactattttatctttttgtttttcttaaatctggatcagcttcttagcttttctttgtatttcttaacattgaattttagaagagtacaatctagttgttgagttaattgttcttggttttgcctgatattttctcatgattagattcaggttttgctttttgggcaggaatactatgtaagtgatgatgtacccttctcagtgtattggcttggagatacaggatgtcagtttgtcatgttattttattagaaatgataattctaatgccttagttgtgatggtgtcctttgggtttctgcactgcaaagttgctattttttcctttgtatttaataagtaatttgtggaaaggctaaatatcctgttcctcttcaaactttttagggattttagtgccagtgataattttttctttagtcagttattactgtaatggctgcaaaatagtgattatgtaactcttatttctcttaacatttattagttggcattctactttaaaaatgagctttcccactccgccacttatcacttagactcataaattcttattttatgtgtgagaaagtgtgtatgtgtgacttacaaatgtagcttatttgtatacatggtgtttaaaccgtatgtatgatttatatatactgtaattcattttgatgtgaacatcagattgttcctcttcaaacttgctctgtgacctttgatatgtctccatcatgtttttttttttagggtgtttttatagtttggcattaccaggatgttccaggcttatcttgtagtttccctgtttcttccttagaagcagccattttcaaaggcactctgattccttttagtggggaatggtaattaaaaaacaagatcagggtgctagctgtgctccttatactagggcatccttatttccaggccttttcagcactcagagctaggaaagaattagcattttcaagatgaaatttccatgtgtgttttttaaaatacattttagtcatgaaatcatcatgtttcttttacttccatttgaacatcacaggattcttattcctatttctctttccctattccatattgcatctccttttttttccacaatgagaacgtggctcccagaatcttgaaatacacatataacagattcagaacttttactgttataagaaaacctattcagtagtttaggatttgtttacagttttttctttgtctctttttaggctaagggtatataattcagatattgggttcagaagtttcctacagagttgttatattaagaatttaaaatatataatttggtttattgtgtctgtttgtatgcagttttagcatttatttttccttccatgttcactgatttattttttgcatatgtaaaacatctaacagttcgaaaggcaagagtatccaaaggtatatagaaacttgtcacatctttctctgtttctttcattcctgtcagaacagatttcatttcgtttctggtttgtttttcctgtgtttctttttacataaacaagcagatgcataaacatgtatatatatcctgttgctttgaaagagcatcttattagttctgtaaagtattggcaatattgcaaatatctgaactttttatgaagtatgtcaacagggataaaattaacttttttgggaactttactttgaaagagttattttgaaagggattttttataaaatagtataggtttttatgaaacacgtcagagtgttgctgttaactggttgcactaacaatacttatatccattgttgaagaatatagggaaagaaataccaaaatttttagtaagattttgtaaaattgcaaaaattaatattaagaattcatagaggcacagaaatgtattttttgattaatgtattgtaacctgatgtaaatccttagttcttttctcatttctgcattgacatcatactatgttgaagaatatttctaaaaatattctagagttaagaaagtgttgatagcacatctatatttaaatacttagtaccacagcaagtagtttatatgacttgagaatgatactgtaggaacatactaaaagactttagaaaaagcatgtcaagaaaaaaaaaaaaacagaacaaggggggtcagagacaacaatatgtaagaaaaaacatagaaaatttatctcaccagaaacagcacttcttctcagtctcagacaagtactgcctccagaaaagccaattcaagcgttgggaagtggcaggatcgatatgggagggccgaatcacctgatctaaggtaaggctatttttaaacattggatactccctgatgtttagatcatcaatgttgttatgccttattagtaagataataaattttgactgtaccatatttttaccctccaacttatgctttttcagggtacagttgtaggttttttagttaccttataaatcaaaacccagcacttgtcttgctacccatctttctggctgtttataatatttaatgaattatattgaaccgtgctaatggatgctcagtaattttttttttcgttctcttgctgcaggttaattctttctcataccacatcgcatttaaaaaaaattcccaggtgcttttcactacttatcgaataaaacctaacattctgagccagtatttaggacccgtaaaatttgactctactgaatctttccaatcttatacccactacagtgcaaaaacccctgatttcattaagcagacgtagtagctgccctggaatatgctatttcccttattgttgttatgcttttgttaatgatctaccctccagtgaattttggtttgtgttctgaatcttaaatttacacagcatacaacctcgaatggatattataatttctctgagcctgaaaattgaaataataacttcatctttaagggatgcaatgagaaacaactatgttccaatatgaaactacattacttgcagtgatcaatctgagagattgtgctttgataacctgacttcaaaatacagaccaagatactttcctaatttatcatttgaggttttaaataattatgatatacaaggggtaattttgttttttgtttttttttttgcttttgttagagaattttaagctatttacctggttagctcaatgctatataaatatgtttgcaattattttaatttaaaaacttaaaaaatacaaatgtaaattatgatcagatacctttgatcataacacctaaaagaaaagggaggaaacactatcaaaatttgattttcttatgtttcattttctatacagtcttaattatatgttccacatgagttgtaagtatttcctgttaggaaagaagttagtcattcttaaaagtggatatacatctcaaagtaagaatgtctaaactgtaagtctagcaactaatgtagataaaaatatattagctgcattcttagagtagtgtcagttgcatgtgttgctttagaaggttaaggaaagttttcatcttattattttgaaagtactcattgattttttaaatctatgtattatataatattgatttatctttgttttcgaacactaaaattctatttgaaaaaccagtagaaatttcaagagttattttaaataaagaaaagttagatctgacaagtgtagaatgaagtgtatgagtcttttcacatacaacatttccatggaacctaaaagttcataattgtactaatacaacttctatgtaacaactaactcaattattgcatagagaaacacttgggtttatatttaacctggcagtatggacagcctatttactgaacctaaaagggccagacaacaagaacttataaatttatcatgctattggtaaagaaacttaaacttacaattgttttgttgcataagtattggacttggattttaggtttagttttgtcagtaactacctgtgtgaattaaggaaagtttcctaacatgcctatgcctccattaccacaatcgtaacatagtggagctagactgtgtaattcggaaagcctcttcaaacctgaaactctttattttctgactagtccctggtttacaatggaaactagtccttagagatttgagaaatcagagaatttgcccaaattcacagctagttaagaggcaaaatcaggactagaatacctgcttttctggcttgtagtaccaatagttcaggcaagtcaactttcatagacaaaggcatagaaatacttaaaataggccaggtgtggtggctcacacatgtaatcccagcactttgggagaccgaggcaggtggatacttgaggtcaggagttcaagaccagcctgtccaacatggtgaaaccctgtctctactaaaaatacaaaaattagccaggcattgtcacagtcacctgtaatcccagatactcaggaggttgaggtgggagaatcacttgaacccgggaggtggaggttgcatgacccaagatcatgccactgcacgccatcctgggtgacagagtgagaccctgtctcaaaaaaaaaggaaatacttaaaatatgttattttcaatgtaattttaaactttgtttctttggctttgttttaacatctggaattccttttatatcagctatttgacttagaagtttttatttaaaattgttttactttagatatagtactttacttttggacaccagatggctaatttatagcgaaaatgttgtttcccatacctgaaagagacacatctcagtgctttatgtatagcaactccatctatacctacttctctctaaaaaagatgctctggaaacaaaaaaacacccttcactttaactttgtaattagtctcaagaatatatgtggaaggaaatttgaagctgtattttcattacgtgttttgtgctttagaaaattccaaaaatagcctggctgtggtggctcatgcctgtaatcccagcactttgggaggccgaggcaggcagatcacctgaggtcaggagttggagaccagcctgaccaacatggagaaaccccgtctctactaaaaatacaaaaattagctgggcctggtggtgcatgcctgtaatcccagctactcgggaggctgaggcaggagaatggcttgaacccgggaggcggaggttgcagtgagctgagattgtgccattgcactccagcctaggcaacaacagcaaaactccttctcaaaaaaaaaaaaaaaaaaaaaaaagaaaagaaaattccacaacagataccctggataaaagctactttttctctttgctactttttctctttttaaacacacacacacacacacacacacactctctctctctctctctctctctctctctctctctctctctctctctctctctctcaggctactttttctcttttaaaacacacactgtctcactctcactctctgttagtgtaagaaaaactagattcctgctcttgtagttaatgtaactgacaaatgtggagtttgaggcattgcttaaatgtttgtaaagagcaagtaaataatgattaagatgtttttcgtaagttattatatttgggctgggcgctgtggcacattgcctgtaatcctggcactttgggaagctgaggtgggtggatcacttgagctcaggagtttgagaccagcataggcaacatagcaaaaccccaactctaccaaaaatacaaaaattaattgggcatggttgtgtgcacctgtggccccagctacctgggaggctgaggtgggtggatcactggacaggtgaggctgcagtgagctgtgatcgtgccactgcattccagcctgggtaatggagcccaacctggtctctaaataaataaataaatacataaataacagttattatatttgaagttgtggccttatcatatgctagttactattaatttgtataatacagtgttttcccgattttaacagtattcttcaagccaaatctgtaagtgtttttcaaactttaacagtattcttcaagctaaatctatatgtataacagtggcattttattggtgtaagtttgctttataaaatcaaatttttaactcttgtgaaactaattagaagagtgaagcagtttcagtgagtgcaggaaattgaaactggtaatatggatgattgctgtaaacatatcctaatgcacagtttatttttttattttgtttccattttatgttaccaagttctgttcctcttaattttcaagtgatagtttatttttcttaagcttatgttcctatattacaatgctttttaactgattcatactcttgaatgaatagtaaaaattgcttttcaatgttaaatcacgaatacatttaaacatgcatgtatttcttctattaaacacaatacttataataaaactggacgttaaatgaatattatatctaagaatgacctcttcctctgactatctccttttatgtcttgatgagacactgtactgaaaagatgtgcccataccttggggcatttgatcaagtgctctgaatgcatgttgctatagtgtgtagtttgtaagattttatgttattggacatatgaaggcctttggggttttttgtttgtttttttaagattcttgtagagctgtgtcttttcctatcattgatacatttaaaagcatgaaattaagcataaatatggaaggtagagctttattccaagctctgtacaaaagtgagtaaacttgtttgcacttttgaacacacttatgtcctccagtgagtgaaatttgggcttatttcacctttaaacattcaaggtttttttgttttgttttaaatagagcttaaaaattgacatttaaaaaattcagaccccagaaaattagtatgataaacactgttgaagaagaagggaaggggtttgaagttggttatgctaagcctgaatcctagtgctgccactttacaatgcaaaagagcctctttccacatctgtgaaaatgaaactaattggatatgtactttactttttattttttcaagacagagtctcactctgtttcccaggttgagtgtagtggtgggatcatagctccctgcaaactcgaactaccaggctcaagcagtcctcccatctcagcctcccgagtagctgggactacaggcatgcccaccatgctcggctaattttttattttttgtagagatgaggtctcactatgttgctcaggctgatcttgatctcctgaactcaagtgattctcctgcctcggcctactcccaaatcacacctgagattacaggtgtgagccactatgccggccccatataccttaaatgtgatgtacttgtaaggattaaataaattctaagctgtgaaagcacctatttcagggcttgaaagataaatcagccaggcgcaatggctcacgcctataatcccagaactttgggaggctgaggtgggcggatcacctgaggtcgggagttcaagaccagcctgaccaggccaggcgcggtggctcacgcctgtaatcccagcactttgggaggccgaggcgggtggatcacgaggtcaggagatcgagaccacggtgcaaccccgtctctactaaaaatacaataaaaattagccgggcgcggtggcgagcgcctgtagtcccagctactcaggaggctgaggcaggagaatggcgtgaacccgggaggcggagcttgcagtgagctgagatcgcgccactgcactccagcctggacgacagaggaagactccgtctcaaaaaaaaaaaaaaaaaaaaaaaaaaaaccagcctgaccaacatggagaaaccctgtctctactaaaaaaaaaattaaaaaaaaaatagctgggcgtggtagcatgcgtccgtaatcccagctcgggaggctgaggcaggagaattgcttgaatccaggaggcagaggttgtggtgagctgagatcgtgccattgcactccaacctgggcaacaagagtgaaactccatctcaaaaaaaaaaaaaaaaaaagataaatcagacactcagtgagtgtcggatctcctctttcatcatgggctttatcagtctctttaaatgtagtactgatagaaaataaattgtatgtccagaaaagtgttttgaattctgtgatttttattttagactaggttctttttctgggcgggatttttcattaataaattgttactcgaacattagaatatattttctttataaattgtgtatatactgtagagaaaattattcttgtgcttgtggaagtaaaacgtacacacaggtatagaaacagtaccatttcagaccagtcatgttgcccgggctgatctcgaattcctgggctcaagtaccacaaaactaaaagatctgtagaaaaatatgtaatcaatgatattcttatgttgatggatatgactttaaatttttcttgaaataaatattaattttttatgagctactttaagttctttctggagggaacaaaatgtctagcagtctcttgaacatgcccttagatttgtagtcttcaactttgaccatattggaattacctaggaagcttcaaaaaagtattgatgctgggtcccagaaatgtaattttaaatagtctggtgtacaccctgtgcatcaggattttgatatgcaggcaaggttgagaaccactgatttagagccttgattctgggttggcataaagattaaaatcaaatgatagctaggcacctacggttttgaagtaaaatgatagatgtagttacaatgggagctgatatttgtatagcattttacagcctcacagtctttttctttatgtgcttctcatttaatttacattttctgcctctttgaatgtcttttggttggtaaccactatcaaaggtgcatgatacttctgttgcaagcaaatggataggtaatatatttgccacgtagaaattgtgcacatatctacccctctccatcttttctctatgctcatagttgtccctccatctgaaatgttctatcttcccatcctacatgtcttttaaggctcatctctttcctaacgtagcttaaaagatgctacacaatttccatgcagaactgtttacagccatctatttacatatgtgacctgaattaaatgtcataacaagtgcatctcttttcaagttgggaatatgagatagccacattctaggctttttcttagcaaatggacctttgaactgtttgctgcccagttcttattagaagcccttctgtgagaaaacattcatagatgtctacattgatatgtgattcacccattcttttagaatatggttataaactttcaagcaataattcaagcaatatttcaagcaaaataatttgaaaatttgctataaactctggacttttgcctggaaattgcatctatacatatctatttatttagaaatcagggacgtcctgattcttctttagagaaccatgttgctagttaagaacctgaactgttctcaaaagcacagttacattattagatcaagcctaaccattaagagggctagatacacagaccacgttgttttgcttcccctgattaaattgctcttattgaattgggcattgttgtgcttcactcagcattaaagggcattttgagaaatagctctttaaaattcaattttttttggtaggaattttggagactttatttccatatttttgaaaacatgagattgcaatccattagtgggttgtgaaacaatttggtggtcccaaccagtatttcttggttttgtattgtttcttttgcttttttcctatgctatatttaaatattaataaaattacattttatcttagtgtcaccatttttccttttttaagtattgtttcatgaatcttttttagtttttaatgtattgtgggtactggattgctgtgtaaagtgtacttcttactgtgttttgtagtcaataaagtttaaaaactattgtactcatattttctcttagactcagaggagaatctttttctgtttattctcatttgtaaaatgacaataatgagagttgctaccttatgggtttatcatgaagactaaatatatataaagtatttagaacagtgcttaccttgcgcatagtaggtgctccataaatactagctgtcattaccaggaaaacaatcttagagcaaatgctttgttttaatcttaatgcacattaaagacatttgttgttaatgatgtcctttgctttggcttccaagaaaaagcagctgagatatatatatatgtatatatatatattttttttttgagacaggctcttgttttgttgcccagtctggagtgcagtggcacaatcacagtttactgcatccttcatctcctggactcaagcaatcctctcacctaagccctctgaatagctgggaccacaagcatgtgctactatgcctagctgatattttaaattatttgtagacacaaagtctcgccatgttgcccaggctggtcttgaattcctgggcttaagtaatcctcccgcctcaggctcccaaagtgttggcattacatgcgtgagcctgaccttcagagatcaatttatggccttttgtctatcttctattagccctgatttgtcatcttaaactttctgttgcatctctgcagggagccctcagattctttctgggatatcagaatcatcaaaatatgataatttaattccattgtaacttcagagatatttttatattcatttactgtgccaggaggggaggtagaggctcttgggaacatttactgcctgtttaaactgtacattaactcagacacccagagtggttagtttcttagctttttactagatggttgagtccaatatggagaagaggattttgataatagcattagctgtctaccttactgaacaagtttgttggcctaatcaaacctacgctttggggaactcttaagttacagtagatttcctcatagggaaactctattaaatcttcttaagcaatgaaagaaaaagctgtccattaagaactttcgtggaataatatggttcaatatttttttccataatgtggcatcagaataatattagatttttaaattatttgtcagtgttagatattatgtgctttttgttgctgtggtacatactgtgtgtcttatcataaaacattttggaacaaaacggtaagcttaatttatatgattaaagtaaatcagtttatgtggttaaaaaatacgggcacaaggagatgttttgaaaatgtggagaattgtaattttctgaactccctttagggatatatacttgttaaggctgatttctcagttatatgtttttagaaacatagtatttgccattttgaatctttagtgattaaaaacaatcaatttaaagttgaaaaaaactaattagacttctgaccatatttaaggtacattttaagaggtgaatacttccatgtgtcccagactttttgaaaactagagatcctcagaaataaatggtaaaagacaggctatagaaaattttcccctcaacaggaaagttatatctagatctaatttttaccacttttaacaatttggagaatttgctatctgacttgcaagtccaaacaaatttggtagaatttgttcttgatgggaataaatttaaaaatgcaaaggagagagtccagtgattggcaagagaaaatagtagaaaaggaaatagagcgaaaataaaaattttgacaatggagggcagcaattaacagagaggaaattacagcctcagaatgcacacctgtatttagtaggatgttggaatatgaaatgtttgtatatcagagggctgatggcatgtgctttgataatgcagtcatggtaggcatagctttgcaatttaaattatagggaagaaatggaagcaatatttgttttattgtagagatatttggatttttgtaacatgtgaatattaagatctttccccagctgtattggaggatatgttaatcctccaatgaaatcattcatgatctttgggatcatgaggaaatctaggaagtcagtgactcaggcataaaattagaaaggcttgaacatttttaaattgtactaaagttatagagaagggaagtcttaagtgggcaagggatggtaagtgggaactgactatgtacttgaaaacatttcagatgtcatgatgtgctttttatagggctgtctttgttagcacaaaataatttgtggagtgtttcaaggtctacttgagataaactcttactaactcatgatttccagaaaagccttaaattcctcaaaggtcttgctggaaggaaacctagctcaaggggaggggaggtctatagtctttgggattagaaagactcaggtttgaaagttagttttgctatttaattcatgcttgtgtcagtgatttcactttggaccatggcttgtctctaacaagtatacagtaatttttcagtttttgtgaagtttagatataatgggtttggcatccaacctatggtagctgctgttatttgtcattttaggagcctaatctagtgactgtggaaggatctatggtattttaattgttttgcttctataaagttttaaaggcagtattgttcagaactgaaatatagatgaagagaaattcatctaatttgcatccacttttcattgcctatttctccaagtgacttctatatcatcttaggcatgcatacttttgtaaagtcctttatctgcataatagcttttaacattattttatttaaaatacaacttactaggtttttctcttaaatttatagcattgttttatgatagactatttttccatatccttataaactttaaaaagattgtagaggtgaggcgggtatttaaatatttgaatttttctatctaaatgcaagttatcagaaatggcaaactggttccttttttatgttttttaacacttggaatatatcacaaggaaaatatcttgtgtatgttaaaatgagcattattttcaggcctttttggggaatatttaaagtttctgtaatagagctgtagtatgtgttacaattgtagtggtcccaaaatttccatttgtctagcatttgctgtcttatttaatttcacaaagataaatttatttggagactactaaaactagtaagtgtagaagagctctacagagacttaaaacttaacattatgatcattgttgggtatgttggttctagcttgtttattaataaaaatttttatgacaatgcaaagtagtgagcttaaactcagggatatttttcaatgtgtattgtgatctggttttattttaaaatttattgcaaacacattttgtttttatttctcactgcttttattattttttaagcatctaattaggtgaaactgaattgattcaatttttatgttacaggagattacctggggcaattgatgttatcggtcagactataactatcagccgagtagaaggcaggcgacgggcaaatgagaacagcaacatacaggtttagtattttaaaataaataattttctttaactgaaggatgatatcaacattataatttaatttattcaatagatagtcatagtgctatgctgtgttttaggtgatacaaagagatttaaaatgtgaagccagtcatttattataaaggcatttccagttagaatttataatctctgaatctttttttaatagggttttctttcttttccttggtagaaacatagtacaggttgagtatctcttatctgaaatgcttgggaccagaagtgtatcagattttgaaatgtttggattttgaaatgttcatacgtatgtaatcttagagatgagacccaagtctaaacatgaaatttatgtttcataaataagttatttaatttgttataatgatttgttaatttatgataatcttttttcctttggcaaccctgagtaaactgtgtagtgggcctgagttttgattgtgatccgtcacatgtgaggttgggtgtggaattttccacttgtgataaaatgttgatgctcaaaatgtttcggattttagagcatttcagatttcagatttttggattaggaatactcaacttgtatataggtttactgaatgaaaaataaaagaccaccagtgattttaccacctaaagataaccacatctggtacatctcttgatactaagcaaaattgggatactattataattatatttctgtgtatacttttttccccatctaaaattatcatttgtatgttttcatattcttaaaatatgattaaaatatcttcatgatagcttcattggataaatataccatgatttatttaatgtgacatttctggaggtggcgtagagctgctttgtttttaggtgaaaaattgaggggagataaattatcagtaagttggataattaatgttagaactttaataactgagacttccagctattcattttggccatactttttttcattatttattcctattttctgagtccttttaaaaatgtccagagcactttattcttacctttgataagttgatcatgtaaaatattccttttagcatctttaaaggcaaatcatttctatagtggaagatgttagtccatttttcctttccccttaccattaaaatgccacgatttctcaaaataaatactttaagaaatagcttatcagcataagccctacaaaaaacactgcacttaaatgtaggaagtgttaatggaaagagggattgtatgtttaaaagattgctttagtcagcaaggatctgagaagtataaattaaatatacaacattatgttggctgtctttcccaaatttatttacacatccttggggagcttatcaaaaatccagattttgaggtgccactttgcttgttttatttcagtaggtttggggtgcttcttatggtgcctgtcccttaacctgttcacacaaagaagcattttgcaaacattgctttatttttcaagaataaaccctggtcttaaagttacaaggctcacatgataaagttacttacatatcttgctgcctattgcttgcagtctgttgacacatgcctgacagtttcttactttgcaacctggtgatgacaggcccttgtacagtgaatgtctgacctgctgccatgttaatttcttaaggccagtgtctgtgattaatgattacattgccttaattgaatacttcaactttggttgggtgacaaagataatacttgttaaatgatctttatgaagtacttttttcttgtgtggagtgtttgtattaattactttttattaagaaatttttggtaatgatccagttgttttttcttaagatttgaatatgcacatttttaaaactgtatgtatgtgtatactcacacaggcgtatgtatacacatatcacacatgtagaactattactctccccccaaaaatacatatatgtgaattaaactaccttttactttgtttcttagattaaatgaaattaatttactaagattaatcttacataatatttatgcatctgtttaattaactgtgctctaattttaggtcctttctgaaagatctgctactgaagtagacaacaattttagcaaaccacctccgtttttccctccaggagctcctcccactcaccttccacctcctccatttcttccacctcctccgactgtcagcactgctccacctctgattccaccaccgggtaaatagtaaataagacatttgactttgaaagaaaaatagcttgcgagtgttttttaaaatttttgacaattaaaataatatcttgatcacatttcattaaaagtaatagatataatatcttcaacagattcacactgaaacagatatatatatgtttattgctatttcaatataggaaagagacaatgttctaaaattaagaagaatatacagataccaatcttgtgattcaaaaatatgataatgatccccaaacttaagttgctaatagaatatgtataaatccatactcagttacaaactttaccagtgttaatttgttttgaaaaaaacattaaaagatactttcaggatgggagtagatcaaaaaattatatcttgcgaagagattgattaatatttcagtctggtcttcttctgtataccggtttccttttaggagactgctactgggtgcctggtatttatttcttttaaacaaaagtaaatgttgatcatatttttagctacttttgattacaattaaaaaccaggttagtggtgatagagaagaaactcacaaataattcccaaattttatttttatttgaatttttcatcgggttgcctttcttactttgtttttaacctttatctgccttaaccaagtttttatgaaactagcaagattgattgagataataattacttcttcccagggagaaagctagtagtaaatgatgaaaaaatagctgcttgtcctcatcagggcaacatgaaagacgtatgttaggctttacttcctattaatcaaatcagtttatactagagagccatgtactctcactcacttttatttgcaagagagctgtctttgttttaaggtgccagttgtgatccgagtacagaaccaaatccagggtctgaatagtccttccctaacatattcatccttggcctctaaatgtcagccactgcttctgtctttcatcttcagtgcctttgatttccttccactgtcacctctactctcaaaaagtatgagaaaaatatgaaaaaatgacttgtggctttagagggtctgttgtctcaacaatagtggaaggaagaggttggaatataggttagaggtccttattccagacaacattagtatttctaatttcagtgaatttctagttccaacaaatagattgagcagaaacgactcattagttgggattgacttgtggttcttgtgtctttaatatgctgagtattaaccaaatgaaagaggacttaggtgattcaaaatgaggacttctgtgatttctatgtgaatcctttgtcctctgaaaaagaattagataaataaaaggtagaaataattaatgtttcaacatatttgattaatgatactaaaaaaattattaatgtttgtggtactctgttggattcctttgtaatattacttaaactttactaggtagtgatttgaaataattttctttttttaattcttaaaactttttaaaaattttatttttgacagtaatacttgtatatgtttatggggtacaatgtgatgttttgattatgtctacattgtagtaaatcaagttaatatattcatcacctcacatacttaacatttttttgtggagagaacattctgaaatctcctagcagttttgaaatatacggttattaattatagtcaccatgctgtacagtagagctccaaaacttgtttttctcattttactgaaacttttgtatcctttgaaaatcatctcccctacctcacccgtggcccccagcctctggtaaccaccattttactctctgcttctatgagttggatcatataagcgagattgtgcagtaattgtctttctgtgcctggcttatttcacttagcacagtgtcctccaggttcatgcatgttgtcacaaatgacagaatgaaaggatttccttatttacaaatatagtatatccccagatggctaacattttgtatgttcagtactaattattaaagtaagtaggacagagttggtatgaattaatgacaacaaatacttagctggtataagaatattcgaaactccgtagaatattgctacagaggtaattgctacacataggcagtagcattatctggaagtttactttttttcaaaatgataaaattacttttttttttttttttttttttttggagacagggtctcactctttcgcccaggctggagtgcagtggtgcggtctcagctcactgcatcctccacctcccaggctcaagcgatcctcctgcctcagagtagctggtactacaggcgtgtgccaccatacccggcatttttgtattttttgtagagatggtgtttcgccatgtccaggctggtcttgaactcctgacctcaagcaatctgccctcctcggcctcccaaagtactggcattacaggcatgaaccactacccctgaccatttctttttcatgtaacctttgttcataagtataacaaatctttgaagagtgtttaggttattaatgacattatactatagagtgcagctaattatttttctgttgcttaatctatttttctacttaattctcagctacatgctttccatattttaaaatcgagatttccttttatgtttattcttggtttacatttctatgctcttctgtcaacatttaatgagtgcagattcaaatgaattctaatgctggtttaagcagtacctaactggtatatgtgctgagcaggataccagttcattaaaaccaaatatttgaagttgagactctctgaattgctccttacttttagtagaatgtgagctgttggggagcgtacaggctatgtatttctatctatgtttccctacagttttagtcaagtggtcttgtacgtacttggcattccctaatgtgtttgctaattgagttaacgacatatttatgtatccataacaccaaagatgattttcggatttatacctggtacattcaatcaggatgggcactggctctgaataacagtacggctgcatagatatatgccagctgccatgcttaaagctgtggttttcagttaccctttaccacagaaccacatgattacactatgttccgtagtttgttgtaatttaaatcaccttaagaatcataagcagctaatgaaagaaagctatgattcaggattctttttaaagtattgccttaaaagatattccatttttcttagataaactgtcttgttttttgctttcttcaaaaataatcaaaagaaaatggaaaaacatttttttaaagaattaatttaaatgtattttaatgttgcctttttaacattagacttctaatgtttttaaaagtaaagtccaaaatatgatgagataagtatagtaatgatattttattctcatattttaggatgctactagatttttgttttgttttgttttgttttcaaataaatagggtgaccatacatccagatttgcctggaagagtcctactttataccttctatcccagcataattattattcattcttagaaagaaattccctggtttagatgatacaatttctgattgactcttggaaatttacagaggtcttattgcataagtagataagttactgtttaacaattataaggtgttagagataactctcatttgaaggacttttaatgtcaaatagttcacagaagaggagaaatgtattgcctcctctcacccttaaacacacacctgcaaacgtatatgaaactttgctagtaacacagagaggacaaagtatttctggccataatagatttgtatgaagagtagaggagatttatgtattagaatacaacaaagaaggaagagatgtctggaagtgcaaaagcatttatcgtggttccctgcagccatactaacagtagcttgaaaacaaatactgggccaggcatggtggctcatacctgtaatttcagcattttgggaggctgaggcaggaagatcacctgaggtcagaagttcaagatcagcctggccaacatggtgaaactccatctttactaaaaatatgaaaaaattagctgggtgtggtggcatacacctgtagtcctggctacttaggaggctgaggcaggagaatcacttgaacccaggagacagaggttgcagtgagccgagatcacaccattgcactccagcctgggcgacaagagcaaaactccatctcaaaaaaaaaaaaaaaaaaaaaaaaaagaaagaaaacaaatactggctaatttagttcttctataatatccagaaaatctgttatttcattttctcgtgaatcagaaaatagtttccattgtattaagttttttcagaaatacattacagtggtttcatgctttttctgagtaataatagatataatagctaatacttattgaatgctcacttttcagggtactattctgagtacattccatgtgttaactcatttgattcttgaacaatatctgaagtagatgatattctaattttgcactgaggaagcggggacctaagtcatctgagtaatagctagaaaatagtaaaaccagaattctaacccaggcagttttgcttgaaagcctgttttctttattaactatgttgaaatgaatcagtacctatatccagaaaatcgtattattggattacgtgtatttgtcacagtcctagaaacttttttttttaaagcatttctctgatgttgaagtacatgcatacgtatttgtgggtagggaagttagggagattataaggaacagtcatcacatttttgaaaatctgaataaggtttttactgtttgcctggcttgtgttaagaagtctgtgtttagctgaagtcagttttgaaatatttgtttattggaagaaaaactgtaaaactggaagtattaatgttatagggtaggtgattttgtgtgtttgtttattgtggtaaaatacaatctatttgtcattttagccatttataaatatgtagttcattggcattaaatacattcacaatgttatgtaaccatcaccatgagctgtacctaaaactttttcatcatctccagtgaaaactctgtgcccactaaactccttccctcctaaggatagcccctgtaacctctattctactttttgtctctatgagtttccttattctaggtacctcatataagtggaatcatgcatttgtctatctgtgtctgacttactttgtttctaaaataatagaatttaattaatgattgtgagctaactttatggtaggctttaatttaggcttttaaatgttaatttacttcagtgtcatcatatttgatgttcatttttttttttgtagtggagtttactgtagaatagaaggtaaattcagttaaactcatttgtttttgtatgaactcttatcagcctcaaatgactagttctgtgggtcttgggaacaattgaaatgtagcccagtagtggaattctgctgagttgaagaagggtctttgctttactgagatatagcccaactactgtggaccacaaaccaggatccctgcttttaaagttagctatagggtttaactgtttatctagataccagatgtgtaggattctgcattttagaaagaagtagatttcttcctaaaagactgttgtcttgtatcagtgtctggctaatcatctagtactactaatttcatgaactttaaaatcttatttattccttaaatatgttaatttcgggttagggatgatatataggaatcgggtcagggggtgggggcgggtggcgagttgctcatatctagggtcattctgcatttcctctaagtcctgcattctcattagattatttttctgttagcagtctggttctttagcacagcagttctcaaaactttttggttacgtcttctttaaactctttaaaattactgcagatcccatagagcttctacttatgtatgttttatctgttttttaatattagaagttaaaactgagaaattaaaatattagagatatgtataatacactcattacatgttaacatttttaaatttcttatgaaaaataactgtacttttcctagaataattttaaaaatttagtgggaagtggtcttattttatgcttttggaaatctctttactatgtggcttagtagaaaaagctggtttctcctgtttgttttcacattaaatctattgtgatatcacgagttatgtggcccctggaaactacactgtaagagaatgagcatgaaaaaggcaaataacatcttagtaaatttttttttttttttttgagatgaagttttgttcttgttgcccaggctggagtacagtggcactatctcagctcactgcaacctctgcctcccaggttcaagcgattctcctgcctcagcctcccgagcagctgggattaccagcatgtactgccacacctggctaattttgtaattttagagatggggtttctccatgttggtcaggctggtcttgaactcctgacctcaagtgatccacccacctcggcttcccaaagtgctgggattacaggcgtgagccgctgcgcctggccacagcttagtaaatttatgaaagtagttttgacctggcagattcagtagggtctcagggacctccgggaattcctggacagaacgttgagaacactgctttggcagaagcttggcctgtattggatgaatattatcagtgcccttgaggaagtacacttttatccctttaattgagaaactagtttatgactataatgtttattaagctaattttataataccatgaatttttggtcttactcaacagattacctcaaattaactggcactgtttgccagaaatgtaagcattttccagagttaccattaaaaaagaactcaaagtttttgaaaactgtatttattcttgtgtttttctatattcaatttaaaaagcctgcctatcagtgttttcattaaattcaaaacagagagcaatgctaattatctataataaatagaattttctggcacaattaaaatttatttaaatgtaaatttaatagagattaaaagctttcttaggatgttgatttttgaatgtgctttctcctccaggatgcaccctttataatagttacattttgaatacatcattgacaccacattttgttgaatctaattacagtttaatttgtgccttctgcttacactgctcttttgatcgtctcatgattatatggaagctggtagagatcatttctttacaagttctctattaaaaaacataggtatttctatcaaaaatgttttgtgtaagatagaagtttatcttctgtaggctttagattttataaaatagaagagtaacagatcctaataaaggtaacatagtttgtccattttatagtgtatgtaaaattaccttttttaccttttagacatgaagtatgctggtaaatttttggttactttgttgtgtgaccgtaccactttttaacccttttttcttttcttaaaaataacttaaaactttttttgcaccttgtaattgttttaattatgaaataatggttttgccatattctttctacattctggtttgtatttaagggtggatggtagatgagatgatacacgtgtgtgtgcgtatgtttttgtttgtgttgaatttttaaaatcctgatacatagaaacgcatttctggtagaaggtgatatttaaagatttttgtaaaccttgtccttttctactcattttgagtaaaacttctgagcttgatggctttgaaatacaagtcatgagacttaaggaaagtgatcaagtttatctgtttcttaaataatagtgccgacggaacttggaatttactagtgagaaataggaagcgtagtttacatattctgccattttttttctttcatgtgaatttgaatagagaaaagatagatggttattgcatgtattgggtttctactgccgtataacaagttactccagaatgtagtggcttaaaacaacatacatttattattgaacagttttcatgggtcaggaatctgggacagcttagctggatcctctgctttaaggtctctctcagacctcacagtcttctccaaaagcctgactaaggaagtatttgtctccaagctcactcacctctttgttaaaaggattttgtttttttctaggctgttgcattgacagggcttcagttcctcactggtgtaggcgtcttaatatgttagcttgcttaatcaaagcatgtaagccaagaaggcaacagagagggtgccagtgaaatagaaataactgtcttttgtaacctagtcatggaagtaacatcctttgattttttttgtgtgtggtagaaataagtcacaatgtccagcccccacacaggacataaataccagcagacagggatcattgagagccatgtcagaagctattttgccttagttatataaaattatgatagactacattgagaatgagtttatagacaatctgtttagtttttttgtgagtgcaaagcccactattaattttgtgggaatttttagtatgggtaaattctttttaatatgatgtttaacaggaatgctgcctttctgtttctttgcctcagttctttcaatctccaaaataggatttcaggtcttacccccacccacttttacatttaagtgtatgtgttatatgctggaaaaattaagctgggtgtggtggctcactcctgtaatcccagcactttgagaggccaaggcgggtagattgcttgagttcaggagttcgagaccagcctgggcaacatgaagaaaccccatctttataaaaaatgcaaaaattaaggccaggcatggttgctcacacctgtaatcacagcactttgggaggctgaggcgggtggatcgcttgagcccaggagtttgagaccagcctgggcaacatagcgaaaccctgtctccacaaaaaatgcaaaaaattagctgagcatggtggtacacacctgtagtcccagctacttgggaggctgaggtgggaggattgctttgagctggggaggcagaggttgcagtgagccgtggtcatgccactcaccctacacaacagtgtgagaccctgtctcaaccaaaaaaaaaaaaaaaaaaaaaaaaaaagagagagaaatcatcttctcttttgagaatgccagatggtgtaggctctcatagtccttttaagtgtcataggtagatgcttttgtttcataaaaattcggaatgggatttatttagtctgtactaaattgctcagcagtgaaattaggagggaagcttagaatcggatccagtgatcctcatagtatagtcctgggccagcaacatcatctgggaaatttaggggaatgtaggttttctggtcccaccccagacttactgaatcagaaattctaggggaagggcccagcaatctgtgtgttttaagagactctccaggtgattctcatgcatgttcaaggtagtttttatttatttatttatttatttattattttattttatttttttgagatggagtctcgctctgttgcccaggctggagtgcagtggcgcgacctcggctcactgcaacctccgcctcctgggttcaaacgattctccagcctcagcctcctgagtagctgggactacaggtgcatgccaccatgcttggctaattttttgtatttttagtagagacagggtttcaccatgttagccaagatggtctccatctcctgactttgtgatctacctgccttggcctccggaagtactgggattacgggtgtgagccaccgcgcccggcctatgttcaagttttaataccactaatctgttcagtctgttagagcttgagtattacttttccaaaaggttttggctggcactagaaatctacttttactactgttacatacagctttccaggaaaatcaacatttttttaaactcatttttcagataaaggatatagaaaagaaacaaaatactttccttatttaagtctgttgtctaggttaggcagcatgtgtttgccaggaagatggaggtgttgggaggggaaagaagagggacgtttgagatgaattttctcttcccttacactgtttctcttttattaagaaaagtcaaatactaaatagtgatttttaagtgagaatgatgttggccttacatgatatcacgtatcagtttgaaaatacattcagtaattgtcaaagaattggttatatagtgtttcatcaactttatagtcttgttttaatgaacatttacttataaagatttgcattgaaataacatcttagatgaaatggaggtctcacaagaagggcccttgctagttgccatgccaactttctgatgtgtaggtattgattggaaagacctataaatgacatggttttttctttgattatgtctttaattccagtagattatttttgtctgtcctatgatactgctgtagtaagattaacattaaaggcagacagtaattttaactacctttgtaatgtacttaattctttggtcatatgtcttttatctctacattttgtggaagtttaacaacttaaatgtttttgaggactaaagtttgaaggggctgactagtaattttttagtttttagcatgaatttacattttagtaagctgtagtaagccttagctaaagtgatacatcctgctcacataatcatttaggtaaagttattaggattatagtatatagaatgggtggatgattttggtatattcctttatcttataaatcttatcttacaaatctgtatcttataaatctacgaaaataatcatgtatttacttatgaaaactagatcaaatagtgaagttaagtagtgtccgtattgttctaaagaaaattaggttgtagtatatattaaaaacatttaatgatctgccttccttacttttctcatttactttggagtctgggactctactagcttgtatggtttgttggattcttttagtttagtaatttgggaaacaggaaggtaacctcaggatggatgagaattgccattagctatgggtcagtttagtagacttgtggattcataaagatttttgaaacttgatggctgctttatgtatctttagtcttgttggctttgtaagtttggaatatgtttttattgtatgggtggttaaaatcaggtgctttggtctcttttttaaggccatttgctaccttaagatctttttaatctaaatctcttactctgataaaacatgcacatcagaacatgtttagtgttagaatatgtttcctttgacaagaaaacatttgaaaacaattctgtttctttttttggcatacatttagctaataaattagattattttttggactaattttgatgcagtttttaagataggatttaggaaaccgttccaactgttttagttatttatggtatacaacttttcatgaaaaagttactttaaattgtcttacttttttttattttcctgcttagaaatctctcatttttcctccactgaagatagttaaaatttgcatgccacataaattgcctttcatgtatctcttaaatttaaaatgctgaatttaattttagtatttagtaaatacattttacattaggctttaagggcacatttggtccctgtaaattaaaaatatacatagtttattcctcagagtttataatgtgtacaaataatgagtgagagtcactcaaattaatatttgctagcacctgtagaagtaaatcattcacgtttatgttaatgtgccctgggggtgtatatatatgaattggtttttccccctttctctcctacaaatcaaaggaaatgttagccttttctcacttctgccaacaatactagaacagtcaacacttgaatgaaccacaacatattgagctttacaaaagtcagtaatatccatcatcttgagttatccttgtactacctgcagtattagagaaagaacccacagatcagtttttctattaaaatgttaaaataacaacctcaggcattgattatcatatttagtaaggattaacttcatggcatttgataattgtgtgtgcataagtgtgctttttaactgatgtctaactttgtgattactagtgggggaaaccttgttatcaagttgttagactgggttttcatcaaggaagttggatgttatactcgaattgttagtcctctacgagaaaacagaatggttctcttgagtgaataagccaggataatgaggcgaggggttttatttcaaagtttgttttggtgatggcataaatacataacaggttctgaaatccaattactatattaaatttcatcacttgttttttaggtattccaataactgtaccacctccaggtaaaacttttttcatgttttctccatcattgttaataaacatgaaatttcaagcttatagttacaggagagacggtgttgatgcggttagaatatggaataggctatggggatttcaaggtcctattttcagctctgcctttgcttcattccagttttgattaagatatttagttttcttatacctgtcttacccgtttctgtagaaatagagattctgagaaaattcttacctattcaatttgtgaagaaaacagtataggatataaaataaaagttttcttaaaaatgtctttacagaccaatgaattttttatgtaatatagtgactataagagaagagaaagataatttattttgtctttatcattatttccgattttttaattttagtcctgctggcttagtatcgtgagaaaatgtgttctaaaccccacatagcaactagacagacagctggtcaggtggctgttcttagagtggtgattgtttattgttgtaatagtatgatcactaggagtttatatgtggcccagtgttttatttatttatttatttatttatttttacatttttgtcagttatttctttttatagtgtgatatcacacctggtagcaagtgtgtcttcctgagttcagtgttaaaagccaaggtgtgtaaagagaatgagaggtgataatgcttgcaagggtgggtctaaattcaaaatgacttcaataaacagaaagagtgaagtttaggtagcatagtacagtatacatacttagatgtggaatacagacattgattatgtgtgaatgtgtctgaaaaagactcatcagggaaagtcaaaggaatcatttgtgtctttttagtttaaaaaacaatgtggttgtgaggctgtatgaaataggattgtggactttaggactaatgtggtaattgccaaattttgtacttttaagatgtttaatagaggaattatagatcctaacactggatacagtgaagaacatggtaaacatgaaaacaatttgaagtggggctaaaaatggatttaagtggacctttgagaaggattcagagaactgattcattttttcacagaattactaaaacggaggcttagtggaagtgttttcacataactagaaggtgatagacagtatgacagtggaatacctcttgttctcatttaggacagtgtctgaattgtagtatgagagacttaagttagataatttagtgcatttcctagtagtgagagttgttaattgttaacacttggaaggaattggtatcataaggaattgacatcataagttttggaaatctttttctgctaggatgctttatagcctatctgaatttgaaagtgtagtgtagattaactgttttttagccatattattctgtggtattccatttaggtattgtgaattattcagaatgcagaccccacgatatagaggtacaaattatattccttccaaactaatacacaaactatattatgtgcttttctttgtaaaacagtttgttagggttgtgctatttgaacatattttctggtggatattctcagctttgaacactgtacatttactggtaagattttatttataaattacacattttaaggaaatttctatacttctaaaactcgaaatattttttgaaagaggtaattgctatatatctgctttccttctaaaatatttcaaatatatctggtggctactgttttatgtatggagaaggtaaggcattgagattaactttctcatacttacaaaatgggctgtgtgtggtgctgaaaataagaccggtgtcctgactcccagtttgttttctgtgtattagaccagactgcttacttaaagttttattgcgctaaaaatctgttcataagtttgagctccatttttttctgtccattattacaacatagagaagcacattcatatccccagagaaatttagtgatatgcagcaactttgtttcactcttgacattaagtgtacattgttaacattttttatcttatgattgaatgtttcaggttttcctcctccaccaggcgctccacctccatctcttataccaacaatagaaaggtaaatcagtatggatactgatttttgatcattgatagccttttgacagaagaaccatatacttggaaatattttcagatatttaattttataaacacagcacctgtcttttaatttataaatctagatctatgttagttacttttatataagatgttggacctgtagcccgatatcaaaacagggcaaagaaaactaaaatcgtaatattttgaaataatatcttgctttgatttatgacacacttgattaaagaagctcctagactgttaaaaacccagcaagtcagttttatgggaaatacaaacataaattactggaaatcatgaataatacatgtctgttttgggataaagtagggaaaactattatgggaccatagtcaagaaaagctgtcttattccttgatacaccatctcagcttccacaaagaaggattagatccattctgtgtggcagtagccttattttttgtaccgtgtatttaaggcttatgctaactagaacgctgtacaaagaatatttccttcatgggtggcagtatggtgtttaacaacatagaaatcaaacagtgttgctaggcaaggttcgtaagccctttgagactcagttttcctttttaccaaaagggttgatagaattgtgaagatttaaaaggctactgaatataaagtgcaagtataattcttggcagatagaaatcactaataagagttattgttatttcctcttaagtggcaaataaactgttaaaaatagtgtgtttctgaaaaaatgattcaaataatgtaaaaaggcaaaatatgtgagaactttacatcagtagcatcaaaccctgcatatgattttcagaggaaactataaaatcaagaaagtatgaattgtgagaacataaggatttagttttattgagtgtctgttagacacatttattttctcagtcaaaatgttaaaaagtattctttgttaatcctgtcagtggggctgaattactgatttatcaccaaaaaaccaattatttaagactaaatttttagtctgaaatattctgatagcctgaaattttctattactttacttgtaactcaagctaagttgattggattatttatgttaaatagtattagtacatcctatttttctgtaaaattaggtattttaatattttttaggttaaaaaaaaccccatgttttattaataaaattatagaactaaattatcattaaattggtggttggataaaagttgtaattttgccttgtttttccttttgtactacattattaaaattcagaacttatttgtaccagacataaaaatatatctttttcttcaacagtggacattcctctggttatgatagtcgttctgcacgtgcatttccatatggcaatggtaagtagtattatttagatgcctagattcagtttgaatcagtaaagtacttgaatatttttaaagcaataaaaacgtgttcatggtttaacatcttacagagcaattaaaaaatattaactacaggaatgagtggtctatgtatctgccaggttagcaaacaataaatttaatgtatttatcaactgtgcttttaaaattaattcatggtgacacaacagggatatttgtactttgccttttctaaaaggatttaggatttgtcaccaatttgtctcaatcttcgttgtttgtaacgtttctatttcttcacttatggcacacacctaaccttgtttccatctttctccctcgctggtttattttttttctgtatcatgtgtaggtcccctttcatgttcattcttgacaactttatccattccaaggccttctgaccccattttcttttgcacctcttgatcagtcatttattttaaaaatgctgtgcattgtactaatttttttttggagacagagtcttgtctgttgcctaggctggcgtgcagtggtgcgatcatggctcactgtagcttcaacctcctgaactaaagtgatcatcccacgcagctaggactacaggcgtgcatcaccatgccgggctaattttgtagagatagggtctcatcatgttgcctaggctggtcttgaactcctgggctcaagcaattctcctgtctcagcctcccaaagtgctgggattacaggtgtgagccaccacacctgacctgtactaagttttaaggatagagtaacctgtatagagtgcttgccctcataaaagttataggcttatggggagatagctgggtgacaggagttagagggtgtcatgggagcatagcagaggggtctcctactccagagaagtggaagggtagataatttgacttccaggctattcagagataaaggagtgagagggaacatggtaggtattaggagctggaagaagtgtgttgtggctggaatgtagagactgtgtgcttatgcaggacgttatagccatgctgtggagtttggaccttattcagagggctgtgtggaaccagttagttttatgctgagttgtgaagttgctacatttacatttgaaaaatctccattctggctagttacgatgaggaagttttgaatttatagggtgagtagaaaggtggggttggccttcttggattggaacagcaataagaagttgtggaacatgtgggggagtaaaaaataattttctccctactcttcctagttcttaggatggaccctgtattaaaaggcacattaacaagagagaaaagaacaagtttattaacatgtatacctcatatatccatgggaaataaccagggaatgagtagttctcaaagagatggcttagaaatccagattatatagcatcttcagtaaggagcaatgaatttttagagaagtgacaagataaaggaaaagggccttgagtcttcatgagcaaccagttgtggaaaggcaatatatactatataaaggctagttggtgaacattctcatgcagtttcctctggtgccttgtccatgccgataagggtctaaatttgtcttcagtgatcaacttttgtcctttctggtagagagaggaggaaggacacctttgtctttgtaaacttacatcgtgcttttaggcaaattagggagggcgggaagcttttcttgtatctgcatctgttcagctaccttcagctcaaaataatccttatgtcagagagggatgttttggggtgacatattctggtctcctacagaagtaatccagaggaaaaattaggatgtcatgtactcaataccattgaagatggagatgaagaaaattgaatagactccgaaggatttatttgatagaataaagtcttagtggtagatcagaaataggtaccagtcatacacttctaggtatctctatcagggtatcgtactgtccttcaaactgtacctgttcaaactgcgcttgccattcattcactacaaaagatggtatttatgttgacttacttgtttcaatgactatgtttcttccccttctccccttttttttttgctagatatttaagtagtcatagtccttgggttgtaatcttgattccccctcttaccatttatgtgacttaaagatattcagccattaaatggacagctcagttcttccttttaatgtggagttcattgaaatacattgaagcaccttagtcctgccatttagtaaaccatcaaatgttacctgttattttttataattatcaccctaatctccaacaagctccaagttccttcccttttctgcactctgaggcagtgtagcatcattgttaaagcataggccctgcagttagacagcctaggtttgggtcctgggttcatctcatgttagtagctttgaataataacctacatcgtttttttcatctgtaaaataaattttgactattaagtacttggtatgatgcctttaatatgtaagcatttggtgaacatgacttattaaagtttgattgttttactattttaatgagactttccagtttctattttgttattcagttccatgtatatttgtttcaatacagataaacatgaggaatactccatattagaaagagagtaattcttgagattacccattcagtttcattacagaatattttattttttaaaaatgctaacttggtatttaactttttctcaaggtaatacatgcacatttttataaaaaagtgagagtctcttgcccactctttcctgcccccaactcttctctcagagacaaggttttttgtttttgtttttgtttttgtttttttgaatggaaagcctctttagtaataacaattataaaccacattgtaagaagtaaatagaagaaagttagaagtttcctagtaaaacaaggttttagaatgcatttgataaatacagcttctttgttggtgatttctgttttacctttgttttttgatgtgtttttagttctttcagtggtctctacagcatttctatatatgtttatcaccttatttcttgagtatataacttacataccatctgttatctttcaatatgatagatatgtattttgctcagttatcattactacccttctgttttctcccaccaataaaattatattactatttttgctcctcttctcatttatatatgtattactatttttgctcctcttctcatttatctgtttcatgtaccattctactgtggtaaaatgagaatattagtgcgtctttctaagccttcactgaacttttctttctccaccacctagctttgctcaactatacttcttacaatgtttacattttgtcctgtaacaaaaataattcgtggtctgacagatttttaaatctaaaagctaaacaataaacaacatttacattattatgaatgtgtaaatattgtgcactgcagagataattatacacccaagctccacaagggagaaagttacatgacaaataattcaaattacaagttgagtattccttatcagaaatgcttgggaggagatgtgttttggatttcggatgtttgttttggaatatttgcatatacataatgagatatcttggggatggaaacctagtctaaacatgaaattcatttttttcatgtacggcttatatctatagcctgaagttaattttactctattttaaatattcttgtgcatgaaacgaagttttgactgtattttgactgataaccatcacatgagttcaggtgtggaattttctactggtggcattgtgttggctctcagaaaactctggattttgcagtattttggattttcagattaggaaatctcaacctgtaccattgtttttccttgtatgtcatcagttgtgtaaagtcttacacattttagtggggttcatatttggaacatgcctttctccacctcaagtacataaagatattctttaatacttttttcctcccagaaaaagttttcaagttttgctcttcacatttaagtcatttggccatctgaaattaattttttaggtataaagatctagtagttcccaaatcatttattgaatagtctgtcgttcctgagggatgtacgattgtcgtctctgtcatctattacatatctatgtgtatgaatctggttttgggctttctagatattcagttggttagctgtccctgtgctaataaattccataatatctttaattatgagttttatagtaaatctgatatctagtgcatcaaaatcaattgttgcttttacatatgtattttagactgaacttagcaagttccatgaaaaacttgagattttgattaataacatttgtatagtacttactacataatgctctttgaagcaatttatgttaatttatgtaatcctgacagttttaaagtaggtgtattgttactatctccattttatagatgaggaaatcaaaatattaatttccacatgtcacacagtaagtggcagagtcaggatttgaacctatgttgcctggcttcagagtccttgcttttatttactataccatattgcaattgcactgatgctctagatcagtctgtgtggaattcatacctttacagcattgagtttatcagtgatcaaggactttctctccatttgcagaggtgttgttttcaataaactgctatagttatctccatacacttcttgaatgtctttggttggatttagtccttaggtacctaatgtttttgttgctgttataagtgttatatacatttgaacagtgtgttctgtttatatttgcttgtattcagaaatagttgtttggttggttatttttatagccatttacctttctgaactctcactataatttgtaaagtctatttgggaaatactcttgcagataatgacagttttgctcctttttttttcagatccttgtttgtccctttttttgttttgtttatttgttctggcaagaacctccattataatattatataacagcaaattaaattataacaacattataatgtcgaagtactcaaagtggagttcttgtatgattccttttttctttataaaggaaatgcttctagatttttactgttaggtttttgatagaaccatcaggttaaggaaattctgttcctctcctgattttccaagggcttataaaactatgaataggtactgggttgtatcaaatgctttctgagatgatcataattgtttttcttctctaatctgttaatgtgacaaattacattgctacattcttctaatattaagctactgttgatttgctgaaataaacctaacttgcccatgattgattatcttttttctagataaacactgataatgtgtttctaattatttaggattttgacatctaagtttatatgtataataaaattggcttaggatttccctttatttatactgcccttacctgattttgacaccaagattataccagccaggtgggataagtcagggaataatctttttttttccctatttgctgggagtttgtgtaatattggaatgatctgtaccttcactcacctgtaaaaggcatgtggccttgtaggaagattttaaattactgatttaatgtctttaatagttattagactcttcaagatttcttttttgttttgagtttggtaagtttttgtttttgtttttagtagttaatccatttcggctaagtttttaagtgtgttggtataaagtgcagcatattctctttattgtttaatctgtgttgtctgtagttgtgatccctttttgcttctgatgctgtttatgtgttctcttttttcttaatcttgtcataaaattgtcgtgttttatttgttgtcttcaaaaaccaactttcagtttttttccattatatggtagttttctatgtacttgatttccattctttgttatccctttttttgttggattattctgtttttctgtgttcttatattggagacttagctcattaatttttattcttttctaatgtagtattttaagactaaattttcttctggaacaacttgtatccctaaactttcgataaatcttatgtttgtctatgtttagttcctaatgatttaaatttatgatgtttttgacccatgaattatcagaaatgtgtttttaatttgaaatggttaggtattattttctcataacttttaaatttgacttctaacttaaattgcgtggtggtcagagaacaaatctgttactctcatcctttgaaagtatatgtacattttcataaatgtttcatatgtgcttgagaagaataatatcctttgttatgggcagtatcctatgtgatgtccattacatcaaccatgctaagaacatgtagctcaagtctttatttgcatggtggcctgcgcctgtaatcctagctatttgggaggctgaggtgggaagatcacttgagcctgagagttcaaggctgcagtgagcactgttctgtagcctgggtgacagcaagacctcatctcttaaaacaaaaagaaaccacttctgtatttgtactgattttttcatctgcttaatccaccagtaattgagagaaatatgttaatctcccatgatcatggtgaatttcctgttcctacctgtatttctattagtttttactttctaaaacttaaggtgatgttgttagctacctggaagtttaaatctgttctgtttccttggtaaattacatcatccatcttcatgtgatcatcctttctttcctaagtaatgctttctgtttgagtctgttgtgtcattaataaagctactcttttttttttttttttgagatggagtctcactctgttgtcatgctggagtgcagtagcgccatctcggctcactgcaagctccaccttcctggttcaggcaattcctctgcctgcctcagccttccaaatagctgggattacaggcatgcgccaccatgcctggctaatttttttttttgtatttttagtagagacagggtttcactatgttggccagactgttctcgaactcctgacctcaggcaatccgcccacctctgcctcccaaagtcctgggattataggcatgaaccaccgcgcccagcctgaaagctactcattttcgatcgggggttgttttttttttttcctcatcttttttctttcaacctttctgtgtgtttttatgttgtttatattcaggttatagttaggtttttaaaaaatacaaatcaacaatctttgttttgtaactgatgagtcagtccctttttattactgagaatatttagctatttgaacttaactgtccacctacatcttcgtcaagtcgtcttgaattgactgagtttctttctcactgattttcaaaaaatcctgttttcttcattgttttgaaactatacattttcttttttttttttttagtggttactcttgaaatttattattcatacttaacaatgtgtagttacatataatttgaacatctttctccatcaatacagagactttagaataatctttctcttctaacttatatcctattgtggttcattattttagttttcttcttttttaaaaaaaactctgctattgaatagcgtatattgtttatttggatttgcatatatgattaccatttatttgttcaaccattacttcttttcatgttagatcctctaggataatttttctttttctctatctgatagacattccttttttttttttttttgagatagagcctcactgtgttgcccagtccggagtatagtggtgcaatctcggctcactgcaagctccgcctcccaggttcatgccattctcctgcctcagcctcccgagtagctgcgattacaggcacctgccaccgcaccctgctaatttttgtatttttagtagagacagggtttcaccatcttggccaggctggtcttgaactcctgatctcatgatccacccacctcggcctcccaaagtgttgggattacaggcatgagccactgcacctggcatgatagacattcttttggtaaagtctgttggttgtaagttttgcttatttttttgttgatgtttacaaaggctgtttgaatcttgaaataaaatattgttgagtacacttttctaggttgaaatttttttctcaacactttttttttttctttttttgagatagtctcactctgtcgcccaggctagagtgcagtgacatgatctctgttcactgtaacctccgcctcccgggttcaagtgattctcctgccttagcctcccaaatagccgggattaccggcatgcaccaccatgcccggcaaatttttatatttttaatagagacggggtttcaccatgttgaccaggctggtctcaaactcctagcctcaagttatctgcccgccttggcttcccaaagcgttgggattacaggcgtaagccatcgcgcctggcctcctctcaacactttgaagatgtcccagtgtattctggtttccattttttatattgggaagtttgtggtcaacctaattctgattcctgttcaccttgtataatgaagggtctttatatgttaggtttttaagatttgtttctggatcttcccgatactgtgggtattcattcaccatgtgatatttctcttttctatttataaaatgaatttctattataatctcatgacacatttttggtgggcattttgtttttttaaagtaccataacgtttgtttttaatcgtgttttttctttagttgcctttccccatcttcctggttctgctccttcgtggcctagtcttgtggacaccagcaagcagtgggactattatgccagaagagagaaagaccgagatagagagagagacagagacagagagcgagaccgtgatcgggacagagaaagagaacgcaccagagagagagagagggagcgtgatcacagtcctacaccaagtgttttcaacaggtttgttgggtgtgcaggagtttatactatgtattttataagcacttacaaatttattttcgttatgaggaagtgaatttcagttcacttggaaaagagatgctcagggagtacataggaaagccatcttaaaatgataaaggattagaggcttcccattaccttgaacagtagtccttaaatttgtttgtttacttatctcttaaaagaattttctaccccttcatttatttttatcttgccatctaagtttttcatcttaagcttaaattagttgaccatatagatatttccagtgtattataaatattaatatttaaaaagaaaattatcaccacttctattattattctatttttagagacggtcttgctttgtcatccaggctggctggagttcagtggcatgatcatagctcactgcactcttacattggaagaagatgccatctaagactttcagagctagagaagagaactcagtgcctggcttcagagtttgaaaggacaggctgactctcttgtttcccaatgcattgttccctaacgtaggaagtcctgggctcaagtgatcctcctggcctagcctctcaagtagctaagactacagtcatgcatcaccatgcttggctgatttttaaaattttttgtagagtcaggatcttgctgtgttgcccaggctcactctcttaaaatatatccagtggattaaaaacactatagtgattttccaaaattatccattttttaaagaaaatgtacaaatagtctctctttaagaattggaaattttacatttctttttgtattcaaatttttacttctgtaccacttccctcaaagaattttgttctaatgtaaaagtttcataatcttaaaactttttaagtgggttttcctattagtctttcctgcaacacacttatgtgttaagttttaatgtttaaggaaatttttcttgtatgtgttttaaaaaattttcatcctgattttagttatttatattctgtcagtgcaaaccacatgtacaacagtggtctcataagattacaatactgtttttactgtatcttttgtttagatacacaaacaccattgtgttaaaattttctacagaattcagtgcagtaatatgctgtacagatttgaagcccaggagcaataggctataacatatcacctagtgtataataggctgtaccatcaaagtttgtgtaagtacactctgtggtgtttgcacaacaatgaaatcacctaataatgcatttctcagaacatatccctgtcattaactgacacttgactgtatacatataccgcaaattttgaaaataatgtaatggaattgcatcctttaatgagaaggaggagctttccaccatccccagtgagtattactattgttaggaaaaaacagagtttgttcagaatgcttaaaatattcagtaaaccatcctgtaaacagatgtgctgccattcaggctttggtgttccattgatagagcacaggcagagtcgatttaccataattctaagtcgatttaccataattctaaggactccaggattttcagggtggtaaatgggcaccaacttcaacttaaaaacaccagctacattaaggaacaatgcattaggaaacaagagagtgagcctgtcctttgaaactttgaagccaggcattgccttctcctctctagctatgaaagtcttgatggcatcttcttccagtataaggctatttggtctacattaaaaatgtgttgcttagtggagctaccttcatcagtgattttagctagatcttctggatagcttggtgtagcttctacatcagcagttactgcttcaccttgtacttttatgttatatagatagtgtctttccttaatccttacaaaccaactaacctctgctagcttccatttcttctgcagctccctcacctatctctgtcttcataaaattgaaaagaattgggctttgctctggattaggctttggtttaagggaatgttgtgtggctggtttgttcttctatccagacactaaaactttctccatatcagcaataatgctgttttcattttcttaaccattcatgtgttcactggagtagcacttttaattttcttcaatagctttttctttggcttgacaacttgtctgtttggcacatgagggctagacttcagcctatcattacttttgacatgccttcctcttcaagcttcctcattttttaaaagcttaatcatttttagcttttgatttaaaatgagagatgtgcaattcttcctttcacttgaaggcgtagaggccattgtagggttattaattggcctcatttcaacattattgtttctcagggaatagggagacccaaggagaggaaagagatgacctgaacagtggatcggtcaagaacatgtacatttattaagtttgttgacttacctggatgcggcttatggtacccctaaacagttacactagtgcctcaaactagatcctgttcagagatattataacaaattactgagtttattttggtgcaaaaaaaattgatatcgatgcataattttttcatagtatgcattttccgtgaactttttgaagacctctcatattgtcaagctgtctaggactggtcggtagcttaaaactttaccaaaaaaaaatgcacaagaaggaactgatgaggatttactcatcttttttccgtcctttggctcctgctaatatgacttatacattgtaggcacttaataaaattttattgaccaagtaagtaaacactatgacacatgcgtgtgtgtgcatgagtatatgatttgtgtttgcttggtgggaaatgtgctgttgactttagccaattggaaatgtgctgttgactttagccaattaagtgcatgattcttctaagttcaagggcattactttccagaaagtcaaattgtttctaatgtggaaatgaatatatgtgagatagcattgctgtctctagaatgtacatgtttataagtaaggaacttaatgcaaaacttgataggaaataagagtaaaataaattgctttgccaagcaggactcataaattttctttgcataaataacacattgtttatagaagatttggctaaatcctctaattcttctgcttcaaatacatgcacagatattactgagtttttattgaaacttaaaaagtgttaatgtttaaaccacatttgatattcaggttgctgaactgtagggcattaggagtcaatgtttacctaaatttgactaaaatgtttaaggccacagaggcaaaaagtggaggaattttgagttgttctgaattatcccaggaaaaaattacactctggaaaatccaagtgaagtataagtaaaggtttctgaaggctggtattttagcagtatggcatgtagtatatgttgctttacaaattacagggccattgttttgaaaattacaggccagtttcaacttctgttttttagggagcttaattatgggccagaaagaaggctggtcattctaggatgtttgaaatgaactctaataatttccaggtccagagaaacctttgtggttcagccacttatcagaaaaggggatggaaggaggagggtctttatattttgtgtgtaggacccaatcttctaccatctgttataaggttcccatcacagggctgctttcagaatctaaaggctccaggttcaacaagagctggttttagggtaagaggaaaaagagttaacaaatgacacattatgagataattgactttaactatttttatgtaaatctagttggagtcattgaaaagcctcattttttgagagaagttaactatatttatttcctatggtgctagtttattctacttgaagacatgatactaaaaagttctgcttctgaaaaaattaagcattaaattcaccaaggactgtcatttattgagtgcctactctcataccaagcactttataaatgttgtcagttctgtaagaagtcttgaaaaagactgttggcaattttacaggtgagaaaaccgaggtttagagaggtaataggtaatagcctcggtcactcatttagtaagtggcaaaatcaggatgtgatcctgtgtgtactccacttgtactctttctgctcctctctactgactggcatggcatgttacttttcaggtgacatgcctccacactccaaatacaaaagtacatatttatgggtagaaaaaaatagtggaaatacatatacaaatatgtgcaaatgtgtatattaatacattttctgtttttttaaataagattctaaaattttaatgtatcacagataataacttggtcagcagtacaattgggcattaagcatagcattaatgaatcattacttttgctagaacacaggctgacatgtcttttaaaacatggcttatagttgtcacctgactatgttaaaccctgagattccttaccatcttgatgtttcatacaaattactactttcataattcatattaaacacttctagaaatcaaagctcttcagcatattcttctaaaagattattttattctaagtgaatttactgatgttaagttgtagaaagtgttgacttctatgctaaacataaaaaaagaaaaaggaagaaataagagacttgaaggataaagagaaagatggaaagagaatgtcagttaaaggacatgaaaggaaaagaagtctagggaggtaaagaaagaccaccctctaactctagccattagtctcagtttcaccagtctgtgtaattcaatccaaaatcagaaaatggagatgcagcttctatttatgcagttgaaattattagccatgtagcccccctgcccacacagatgtaattaggatgtcagaatgcaggtatgtccaatctgcattttgtatggatgctgtagaagttgctttgatgtctctgttctttatttttatacttctctatttgatgaatatttagtaataaacctaaagtttaaaaacttatttgctttctgttttgtagtaattgtgagtcgtgtatttttataatgttaaacgtatgtccaagactttccaagaatattgattagaaatctgagatatacaaatactattttaattctaaaaggagcaaaaattttaaaagctgataacaatttaaatcagttgcagatctcactttttcaagaaatgaaaaaaccaaagcattgttatattaaatctttttaacagctatgaaagcacagaacaaaattggtcatttaacatgtgtaattattatatatttatattcttagctctagtgctattttgagaacaagcattattttcctctcaattcaacgaatatttcttcctcactaatgttataaaagatgctaatgtgaggattttggatttggactgcagatcacatctcttttacagtttgaatccattcagaattaatggtccagttgtcaagaaaacatttctatttcaatttcagcgatgaagaacgatacagatacagggaatatgcagaaagaggttatgagcgtcacagagcaagtcgagaaaaagaagaacgacatagagaaagacgacacagggagaaagaggaaaccagacataagtcttctcgaaggtttgctctttaataaaatagtgaaccaatagtatgtgagagattttgacttactacattgtcgcattggaagaggggaaattttggcctatgaaccagtcttgcttggtttcattaaagaaaaattcagggccttgtctcaaatttttttaaaaaagcattaaacaaaatacctattgtttgccaaaaatcaaccctatacagtatttccggttttgagttaatgcctgtttctaatttgttactgtatattataatatgcatttcagaagctgtgtataggcactgggaatctgagataatatcagtgaagatggccctataaaataaatacaatccctgcataaaagtcacataaaactgattattcctcacattatatttatgagaaaatgcattagattattttaaacccagtgttatattgagaatttccttagagtgattggatttttgtcactgattgtgtatttaaacagaacacaccttttttttttttttttttttccagtaatagtagacgtcgccatgaaagtgaagaaggagatagtcacaggagacacaaacacaaaaaatctaaaagaagcaaagaaggaaaagaagcgggcagtgagcctgcccctgaacaggagagcaccgaagctacacctgcagaataggcatggttttggccttttgtgtatattagtaccagaagtagatactataaatcttgttatttttctggataatgtttaagaaatttaccttaaatcttgttctgtttgttagtatgaaaagttaactttttttccaaaataaaagagtgaatttttcatgttaagttaaaaatctttgtcttgtactatttcaaaaataaaaagacagcaatgactttatatccaagaaaggaatgtgaatgagtcacttaacagggaatctaaagagctgtgttagctgtgtacatacacagattatctgagaaaaggtcaagggttccacttgggccacagtttttttgttaatcaaacaccactctcttaagaggctgcatcacaaaaggcaacaaagggcccctctaaggcttgagattaaaactagtctttatcattactgctgtgacactcttgcttagtatattaagagactcatacatttttgatatcacaactttttgatggcttttcaatattctaaatttgggttcctggtgaaaccaaatggggtacactttcatatccaaattaataaaacctataaggcatctgggtggcctctatgaaataaattaattaattacccatagtgtagtttctaggaggcatgtgtacacacactcttcattgtggcacaaatttaaatcgcctcatgaccatgtctgtgagccagggtcaagctggtttggccttcttgatgcattttccaaggcccactggtggagcagcatgagtttttatacagttactaacgattgtggaaaaaaagagctttagccatttcttactaaaaacaaaacaagtttataattaattctctgagcgagcatttttagggataagcctaggaggtattcatcggtgatggtaacaaataacatggtatttgaaagaataaattactaggatcttttaaatagtgataatacaaaagtaatcttaattagtatcacatactaaaagacaactataacttctgaaaaatatttattcttgtttgatgaaagcaacgtttctcagcaatgcattttaaaaaatattttagctgtaaattaaaaatggccataatgtacccttggcagacttcagcatataccaaattttaaatttaaatcagcttgaattcagtggggtatacaaatcattttagttgttttagggctttttattgaatagaaaaaatataaacaatgttgtagagtaatgagaaatcctccacactgaaaaaaaactagtagttttaatttttttggaatcatattttctgaggtgtaactggctttcattagatgatcatacttttcctgacatttttacaatgtattctttctttaaatataaaaactgacaagataaatatagtgtttcaacttcttagcctatttgtgatttttctgttttcctctgacccatcattgattctataaaaaagtgccaggccaagaaacaatagttagagtaattcttcctttaagttctttcagcagtcttgccaagcaagcatgtatcattcctgatgtacttctaccattgacagcaagaagaatatcaccacatctaaaaaaaaaaacaaaacaagatatgattagtattttaattcgttgctgaagttaatgcaagtttatcttagtggtgctagattttgctacatctgaccattttaattatgttaacttctaattgagatatttcttgcctcttatttacattctccaaactcactatccattcagcttgtgttagaaggaatgctaaaagtatggggagttgtagtatgggaccaagaatatgtgtaattattttggatttctcagaagttgaatgctacgtacatacttttaatccccacaaagtataataaatacatgccttatctcaaatggggccaagctttggcatttatgaaacaacatttaatacaagtatttttgattagtcattattattacctaattcttccatcattgtatgctggtgttccttcaacaatggatttgatgaaaaaaggtttgtttccattgtattcttcataacctcctacaatgcagaagcccagacttccagctgtgtttcttcgtaatacaatatctttacagttatacaagcacctgaaatagaatgtaatcagtgtacatgcatatttaagtttcacagttaagggaatacttactgtgactcatcctccattccttttgttggcatttttaatggctaagtaccactgcataggtcccactcaaaattgtatcataccttggtgacctttgtgctgttagctggctttttgtaattgaacctgttttccataattttgaatatccttaaaaaactgacagccctattgtgttctgttacacatctactgggaatgataatcatatttttaacttaagacaatgcttgaatatgtattagcaaaaagttggataaacctaaatccttattggtgaacaaacacacttatggatgtcatatttttatttacttgatataattttaatgagggcaaaaatcctttgaataatctcaatgaaagcagtttaagcctaatcctaataaatgaattcgtatactttttttgaccttggaaaaataccactttacacccagtgctacgtttgataagtcatagagaagcatgcacgcataaagtgaatggaaacagaaacgtttaaagattataagaacaattcaaataggaggaaaaacaaactgcaggaaactggataggaagttataaaaggaatgggagaaggaaaggcccagctcttctgtaaattagaatcctcaactaaaatagcaaatgagattgaagaaatttttattcagtggcccccaatggatcagtgttcatataggtacaggccaagtgttaactatgttataattgccatagaagtgtgtgtcaggagctgaattttactccaggatgacgttgttgaccacatttgtagctgtagtccgggaattggtttgaaaggaaattggcattttcatgttgccaaaaatcagatatggctattttgtttatataccgtaccttaaaatattaactgctttttagaaaccaataaaaagtcttgtgaaatgttaaatgataaagttgatcattacatttgttaccaaccttgttagtcaatgtgacgtgacttttttcatgatgatgttttcacttgaaataaaatgagctttagggtttggcaaatacctttaaaatgtaatgctgaaattcaactctaaccagttctgaatctatcgtcatacatacacatcatctataacaatttcttttactgaaatgattgcttaaaagtatgaatttcattaaatttcctattgtaaaatatttatctgctgcatttcacagtaaaccttgatgtcagtggtaaattcattctttgggagctgtggtgtgtcacataacacactttacataacggttcactgactcctcatgtacaaagcaggtaactggctattctgtaaataccaaagcattacattcccacctgggaggatgtgtgcccaattttttggagaaaggtaagaattagatgattgttatctaaggtcatgatcaaatatcagttttaattgcccagtttgattctttaaaatagataaatgagtatacttttactgaatattttatttcatatggagaagctgtaaacataaccatcaaaaatattacgtgttctagttcaaagctttgaacccagtaagtcatagtgtgcctattttctaacctcttgatactggagagaacataactgctttgatcatctttctgcagatgtttaaacaaaacacaaaatcccctgccctcctgaagcatccattcaagttgatatcagtgttcctagttttatttaattaaaaagtaaacgccttcttttagtggtgttttgagtatttaactttattgccgcagcgagaactccgtatgttaatctgtttcaaagtcataccttggttagttgggtctgactttgtgggcatttttttcttaagttgggttatttcactccccactgggaaatgtggcagctgtttttgatcagtgacctcagatactaggtggctttaaactttgaatgtgaatgttggcttttttcctattctgcactcattctctaaatttaggcctatcgaagatttggcatagtataaggaatagcaaggagtttggtagtttttcccaatgagaaaattatggttacctcaagaacaaatttaatgaaatgagttaatgagtatggtggctcatttgatttccactgaaatgagttaataagtatgctgaagtcttgagctgctcaagaagctaagtttttttctaaatttttatatttccccttatattactaatttagtcaatacatatttgagaacactgactttgaactaagtctgcagactacaaaaaacactaaggcagagcctctttcctaagaaaaacactgtttagaaaataataaaccaagtgcatcagccaaagccagttgtgagatcttatttcttcctgatgatttaaattattttaaatttttcattgctaagtggtattagaatagcagaggttggaaagacgacagtggatgtaggatgttttgagctctgtgagagcagaaaattggaaattgaatctatagaaaaccgtcctttcacaaaatgttgctttattattttgctagccctgtgttcagaaaagtttaacttcctggccccaatttatatgaactatgaccattaacttaatagattccagtgagtaatgtacagcctcctactttgattaacctagcatttattccctcttctggatcaggtacctctcagtctgtggtgaagggaccacctttcattttgttttcctagtttattgtagactaatactttatcgttaaataaaaaatgaatttctagaaaaatgaaatatttagctccaatttttattgtacctaacaaatataaaatgttttaatataatcaacatgaaaaagatgtttatgggagattaatatggacaatcagtgttataaactcataattctgtgttcaacttttttttaaagttatgagagaaatgccgagtccccatattaaatgtctatatgcatactttgaacaaacaggtatagcaatgtttaatataagtgaggttgcttactacaataagttgacactgctacttgcagaggataagggataactaaaccattttctactacactattagcagaaaagacaatctcacgtagaaatgttcaggagaacagaagattttaaagcaattttagtaagctcaggcaagtgataatttaacctcaaaatttgtctttattcctcaatgatagccaattacaacaatttgtactatagagtcaaatttaaattatctctcagtgacatgaattctgaattcatgaatttcttctgtgttttttctgaaaatcagaacattctataaaatctgtaagatgtttgatgataacttttgcagctgtgcaatatcaaatttatcacctacttgataattgttatcaagttacatcctaacaatttatggaagctattcttccaagcgtcttgcattttgccctttgatgttattggccattgaaaaacatcttgcatttttttccttgcaggaaatattaagctcagtaaaaatattgaatataatttggcaaataaacaagtttggctgcccagtttacatctttaaaaagttgggaccaaactggcttcctatcttgcagagaaaataagggtttggatctatggttcaaacatttttgacagaacttctctttacttgttagcatgaatagttcgttatgattagcttccttattatcacataataaagagaataaactagtaaactagtatctaatgcactagcctttatgtagtcacaatttttgccatatcactaaacacattatttagtttggctgacatcacggcaaaattttctgaaggaggcactgtattaagttacattcttctccagcagctgctttaatctggggagccagtactccagaaagttttacaatcaatgcaactgcaccagcataacatacccctacctaaaacttccaattcaccaacaatgtaaacttccttagttttgtatggtccagagctagttgtgtttattgccaaagaactttttaaaaattctgatacatgtttaaattgtacatacactaaaaagatttgcctgtgtattcaagttaaaatgaaaaatatgttgctagctttttttgaagttggttttcatatcactagttatgaaacatagtaccctttttaccacagattcacccaatgtttctaagcaaattttagttttcacaaataccttggcaatgtgtatacacatttttaatcttactaacttaaaatgctactttattataggaagtccacaaagtatagagtttgtgcatagtatattggcatctacttccagtgactttaattaaatactctttcaaaaaattattttggctttttgtttgtaagaggcatttatgattccattgttttattagccaacacctctccacaagtggttttactacttcaccaacaatgacagctgcaaacccaagctccacagaggagtaaaagcagcataaactttttgttttaagaaaaaaaaaatcacatattatttggaatcactaatattgtactgttttcagaaaaggtatgtcttgtcttgataaaaatccaatgaagttatattcaccatctataaataggctacttctctaatttggccaataatgttgaactacatacttaaagcagctttgattaaaatttaaatgatcgtaaaaaatatgtttaaaaagaaacctgaagacagccgaataggaacagctccagtctacagctcccagcgtgagtgatgcagaagatgggtgatttctgcatttccaactgagatactgggttcatctcactagggagtgccagacggtgcaggacagtgggtgcagcacaccgagcacgagccaaagcagggcaaggcgtcgcctcacccgggaagcacaagggatcagggaattccctttcctagtcaaagaaaggggtgacagacggcacctggaaaatcgggtcacttccaccctaatactgtgctgttccaatgggcttaacaaacagcacaccaggagattatatcccgcacctggctcggagggtcctatgcccaaggagccttgctcattgctagcacagcagtaaagtgcaaggtggcagcaaggctgggggaggggcgcccgccattgcccaggcttgagtaggtaaagaaagtggcctggaagctcaaactgggtggagctccactgtggtgaagcccaccacagctcaagcaggcctgcttctctgtaggctccatctctgggggcagggcacagacaaacaaaaggcagcagtaacctctgcagacttaaatgtccctgtctgacagctttgaagagactagtggttctcccagcaagcagcttgagatctgagaacgggcagactgcctcctcaagtgtgtccctgacccccgagtagcctaactgggaggcaccccccagtaggggcggactgacacctcacatggctgggtactcctctgagacaaaacttcagaggaatgatcaggcagcagcatttgcgtttcaccaatatccactgttctgtagacaccgctgctgatactcaggcaacagggtctggagtggacctacagccaactccaacagacctgcagctgagggtcctgactgctggaaggaaaactaacaaacagaaagggcatcgacaccaaaaacccatcagtacgtcaccatcatcaaagaccaaaggtagataaaaccacaaagatggagaaaaaacagagcagaaaaaccagaaactataaaaatcagagcgcctctcctcctccaaaggaatgcagctcctcaccagcaatggaacaaagctgaacagagaatgacttcaacaagttgagagaggaaggcttcagaagatcacactactacgagctaaaggaggaagtttgaaccaatggcaaagaagttaaaaaccttgaaaaaaaattagacaaatggctaactacaatagccaatgcagagaagtccttaaaggacctgatggagctgaaaaccacggcacgagaactatgtgacgaatgcacaagcctcagtagccgatgcgatcaactggaagaaagggtatcagcgatggaagacaaaatgaatgaaatgaagcgagaagagaagtttagagaaaaaagaataaaaagaaatgaacaaagtctccaagaaatatgggactatgtgaaaagaccaaatctatgtctgattggtgtacctgaaagtgacgaggagaatggaaccaagttggaaaacactctgcaagataatatccaggagaacttccccaatctagcaaggcaggccaacattcaaattcaggaaatacagagaatgccacaaagatagtcctcaagaagagcaactccaagacacataattgtcagattcaccaaagttgaaatgaaggaaaaaatgttcagggcagccagagagaaaggtcgggttacccacaaagggaagcccatcagactaacagctgatctctcggcagaaactctacaagccagaagagagtgggggccaatattcaacatccttaaaagaaaagaattttcaacccagaatttcatatccagccaaaataagctctataagtgaaggagaaataaaatactttacagacaagcaaatgctgagagattttgtcaccaccaggcctgccctaaaagagctcctggaggaagcactaaatatggaaaggaacaaccgttaccagctactgcaaaaacatgccaaattgtaaagaccatcgaggctaagaagaaactgcatcaactaatgagcaagctaaccagcaaacatcataatgacaggatcaaattcacacataacaatattcaccttaaatgtaaatgggctaaatgctccaattaaaagacacagactggcaaactggataaagtcaagacccatcagtgtgctgtattcaggaaacccatctcaagtgcagagacacacataggctcaaataaagggatggaagaagatctaccaagcaaatggaaaacaaaaaaagacaggggttgcaatcctagtctctgataaaacagactttaaaccaacaaagatcaaaagagacaaagaaggccactacataatggtaaagggatcaattcaacaagaagagctaactatcctaaatatatatgcacccaatacaggagcactcagattcataaagcaagtccttagtgacctacaaagagacttagactcccacacaataataatgggagactttaacaccccattgtcaacattagacagatcaacgacacagaaagttaacaaggatatccaggaattgaactcagctctgcaccaagcagacctaatagacatctacggaactctccaccctaaatcaacagaatatacattctttccagcaccacaccacacctattccataactgaccacatagttggaagtaaagcactcctcagcaaatgtaaaagaacagaaattataacaaactgtctctcagaccacagtgcaatcaaactagaactcaggattaagaaactcactcaaaactgctcaactacatggaaactgaacaacctgctcctgaatgactactaggtacataacgaaatgaaggcagaaataaagatgttctttgaaaccaacgagaacaaagacacagcgtaccagaatctctgggacacattcaaagcagtgtgtaaagggaaatttatagcactgaatgctcacaagagaaagcaggaaagatctaaaattgacaccctaacatcacaattaaaagaactagagaagcaagagcaaacacattcaaaagctagcagaaggcaagaaataactaagatcagagcagaactgaagaaaatagagacacaaaaaacccttcaaaaaatcaatgaatccaggagctggttttttgaaaagatcaacaaaattgatagactgctagcaagactaataaagaagaaaagagagaagaatcaaatagatgcaataaaaaatgacaaaggggatatcaccaccaatcccacagaaatacaaattaccatcagagaatactataaacacctctatgcaaataaactagaaaatctagaagaaatggataaattcctcgacacatacaccctcccaagactaaaccaggaagaagctgaatctctgaatacaccaataacaggctctgaaattgaggcaataattaatagcttactaaccaaaaaaagtccaggaccagatggattcacagccgaattctaccagaagtacaaggaggagctggtaccattccttctgaaactattccaatcaatagaaaaagagggaatcctccctaactcattttatgaggccagcattatcctgataacaaagccgggcagagacacaacaaaaaaagagaatttgagaccaatatcctggatgaacaccaatgcaaaaatcctcagtaaaatactggcaaaccaaatccagcagcacatcaaaaagcttatccaccatgatcaagtgggcttcatccctgggatggaaggctggttcaacatatgcaaatcaataaacgtaatccagcatataaacaaaaccaaagacaaaaaccacatgattttctcaatagatgcagaaaagcctttgacaaaattcaacaaccttcatgctaaaaactctcaataaattaggtattgatgggacgtatctcaaaataataagagctatctgtgacaaacccacagccaatatcatactgaatgggcaaaaactggaagcattcactttgaaaactggcacaagacagggatgccctctctcaccacttctattcaacatagtgttggaagttctggccagggcaatcaggaaggagaaggaaataaagggcattcaattaggaaaagaggaagtcaaattgtccctgtttgcagatgacatgactgaatatctagaaaaccccatcatctcagcccaaaatctccttaagctgataagcaacttcagcaaagtctcaggatacaaatcaacgtgcaaaaatcacaagcattcttatacaccaataacagacaaacagagatccaaatcatgagtgaactcccattcacaattgcttcaaagataataaaatacctaggaatccaacttacaagggacgtgaaggacctcttcaaggagaactacaaaccactgctcaatgaaataaaataggatacaaacaaatggaagaacattccatgctcatgggtaggaagaatcaattatcatgaaaatgggcatactgcccaaggtaatttatagattcagtgccatccccatcgagctaccaatgactttcttcacagaattggaaaaaactactttaaagttcatatggaaccaaaaaagagcccgcattgccaagtcaatcctaagccaaaggaacaaagctggaggcatcgcactacctgacttcaaactatactacaaggctacagtaaccaaaacagcatggtactggtaccaaaacagagatatagaccaatggaacagaacggagccctcagaaataatgccgcatatctacaaccatctgatctttgacaaacctgacaaaaacaagcaatggggaaacgattccctatttaataaatggtgctgggaaaactggctagccatacgtagagagctgaaactggatcccttccttacaccttatacaaaaattaattcaagatggattaaagacttatatgtgagacctaaaaccataaaaaccctagaagaaaacctaggcattaccattcaggacataggcatggacaaggacttcatgtctaaaacatcaaaagcaatggcaacaaaagccaaaattgacaaatgggatctaattaaatgaaagagcttctgcacagcgaaagaaactaccatcagagtgaacaggcaacctacagaatgggagaacatttttgcaatccactcatctgacaaagggctaatatccagaatctacaatgaactcaaacaagtttacaagaaaaaaaaaccccatcaaaaagtggggaaaggatatgaacagacacttctcaaaagaagacatttatgcagccaacagacacatgaaaaaatgctcatcatcactggccatcagagaaatgcaaatcaaaaccacaatgagataccatctcacaccaattagaatggcgatcattaaaaagtcaggaaacaacaggtgctggagaggatgtggagaaatagaaacacttttacactgttggtgggactgtaaactagttcaaccattgtggaagtcagtgtggcgattcctcagggatctagaactggaaataccatttgacccagccatcccattactgggtgtatacccaaaggattataaatcatgctactataaagacacatgcacacttatgtttattgcggcactattcacaataacaaagacttggaaccaacccaaatttccaacaatgatagactggattaagaaaacgtggtacatatacaccatggaatactatgtagccataaaaaaggatgagttcatgtcctttgtagggacatggatgaagctggaaaccatcattctcagcaaactattgcaaggacaaaaaaccaaatactgcatattctcactcataggtgggaattgaacaatgagaaaacatggacacagcaaggggaacatcacacaccggggactgttgtggggttgggggatgggggagggatagcattaggagatatacctaatgctaaatgacgagttaatgggtgcagcacaccagcatggcacatgtatacatatgtaactaacctgcacgttgtgcatatgtaccctaaaacttaaagtataataaaaaaaagaagaagaagaaagacacaagggatcctaataataaaaaacaaaaaagtgggaagtgaaatcttacaacatgcctgaaaatactggaaatttttattttatttttatttgaaaaaggtacaaattttgattttctgtattaaatcatttatttgaacaatgatttattcaacaacaacaacaacaacaacaaaaaaaaaaaaaacaaaaaacaatggggaagtaaaggactctttgcaatataattgatgaacgtgaaagccgccaaaggtgtatgaaagcagatatagaggccaagcagggggaaggctgataaaagagatgctaatggcaatgagagaaatgagtgttccagagagttgttatattgtgctgtgttgtaaagctggaaaaggctaaggtgaaataaccctaccagtaagaagagaataactgagtttgctagtttctgagttaaatgctggccaagtagaaagaagtttttaatgcaccttctggagtgattttcaaatttttttgtgactctcaggccttgactatgaaatacggaaggtgatttcttaaaactaaataaagttggttagtgaggtaaaaaaagaaaagaaaagaaaagaaaattgataaccaaccatattactatgaatgtaaaatatttctgaagcaactgctctatgaacaagagctcaatgcagagataagacttcaaggaagatgagacaacagaagaaatgagccaatggaacagaacacaaaagtggaagagaaaaataaaaacaccacagcaatgaaagtggctgcaaaggaacagaaataatattgaaaacacagtgagcattgaaggaaagatgcaaataagccaggaaaacatgcagcactatttacaatagcaaagatacagaatcaacctaaatgcccatcaatggtagactagataaagaaaatgtggtacatatacatcatggaatacgatgcagtcataaagaagaacaagatcatgtcttttgtgggaatacggatggatctggaggacattatccttagcaaactgactcaggaacagaaaaccaaatacttcatgttctcacttataagtgggaactaaaatgatgagaactcatggacacaatgagggtgacaacagacaccagggcctacttgagggtggaggatggaaggaggaagaggatcagcaaatataactaatgagtactaggcttagtacctgggtactgaactcatctgtacaacaaacccctgtgacatgagtttacctatataacaaacctgcacatgtacccctgaacctaaaataaaagttaaaagccaagaaagcaaaatggagaaaaaagagttgaaaaggatccgagaacactaaatatatgaaatataaaatatatcaaagaaacaaatttctagagtccctgaaaagcagctacaaaataatagaacagttattttgaacgttaagtaaaaagaccaagccacatatggagggaaagaaatgacatgagcctcccacttctccacaccattcaatgctacttagcagtgatgcaatgcctatgtagtcctataggaatgaagtgatacaataatttgatatccaggcaacctggcgcatggctgtttagatgtaccataacttatttaaccagttcctaattggcagtggatacaacgatggtgcagtgcctatcatgatacccaagaacatcagatttgtttttaaataaaatgcatggtacataggagtgtatatgctaccattgtgtttgtgtgtatgtgtgtgtatacatataaacacaggccaggggtgagcaatttacagcccaacccaacacctggttttataagtaaaattttattggaacacagccttcctcattcattcatgtattgcctgtggctgctctcacaccacaacagcagaaatgagtaattgccacagagactgcgtggccctcaaagcctaaactatcaggccctttttagaaaagatttgccaacctctgacatagaatacacaagaaattgataatggtgatcacctttattgaatgaatctgaagggagggagacttactttttgttctctttacattctttggtgcattctgaattttctaccatgtttattctgttactacagggagaggatggaatgaaagaaaccaggaatctccagggttctgaaaatcagtgttgtctatgccgggatatcatgcttccttaccactgtccatttagaggaaatgagcaaagtgcagactctacttcttcttttttttttgagacagagtctctctctgtcacccaggctggagtgcagtggcgcgatctcagctcactgcaacctccgcctcctgggttcaagcaattctcatgcctcagcctcccgagtagctgggactacaggcgtgtgccaccacgcttggctaattttttgtatttttagtagagatgcggttttgccatgttggccaggctggtcttgaactcctggtctcaagtgatccactcaccttagcctcccaaactgctgggattacaggcatgagccaccacacccagcccagactacttccagcaaaagtagagaagtgccatgcccaagggcaaatgacaaaaggtagaggggaagaaagacattcgcttggttgtatttggagcaaaaagcacctcacattgtcctctcttacacaaatgaataatgaaggactttgattacatgacagaatagctttcaaacacaaaaaacaaaataattttaatagatcctagtttcagaaagatttttaaaaataaaactttaaagtcatactctctactttcactcaggctcagttctaaaatgtctaaagggttttaaactgactcaacgctcagattttaactgtttaaggacttttgaaaatgtactgatttagaaaataatttatcaactagtgaaggctcaaaaaggaatctagttaattttgtatttgaggcagggttttgtttttcttaaaaaactcatttgaaatgtaaaaagagagagagacttatctccaccctcaagaaaaacgtactaaaactaaacgtctcactttcatttttccatatttagtcctatgctagtatatcttcagtgatgctaatatttagcattattcacacattggaacagcaagataatcatctgaaggccaacagtttatgctctcatgcaggtgagcaaacaccaacttgtctgttctttgaatagttctgtactggccattttgtagggctgaccccaaattcttccctgaagtaattaagtgagacaagtaattacgtcactgtaaggctctaaaatgtcactaaaatgacaacccagctacttcctgaagttttacacaagaactcctcaggagcaggccctaaggagagatgatctaagaaatgtctccaaacaaaaggtgcttaaacatcttagcaaaggcgaagtgctctggggcattgttttatgtgcagccaaggccactcaaaagataaaactggctggacatggtggctcacacctgtaatcccagcactttgccaggccgaggcaggcagattgattgaagtcaggagtttgagaccagcctgggcaacatggtgaatccccgtctctactagaaatacaaaaatgagctgggcgtggtggtgtgtgcctgtaatcccagctacttggggaggctgaggtaggagaatcatttgaacccaggaggccaaggttgcagtgagccgagattgcaccactgcactctagcctgggtgacagagcaagactctatataaaaataaaataaaataaagccacagaaggcagtcagcctccctgcaagatcccagggctgccactagcagattaggcgaaggtgaaccttctcctaggcagtgcaactcagctccaaggggtgtaaacacaggctgggtctctgccccctctgcctgtctgtggagctctctgctgcatgaacaacctacacagctgtacatggcagtcctgtgagctcctcaacctgaacgccaaacagtatttccacatccaggcttttgtctttgccctagaatgtccgcatgcattttcagttacaaatgggaagagagaattatttcacagtcccacaaccaagactgggtctaattaagatgctagtgccatgaatcagccctagagagtgaaagagtggtttaagaaatgtaatcgttttctcccacgcccctacagggatgttgtgtttggacttaccgtggtaattccagccacatgacccaggatggggaccagtcactgggtggggccatgttgtggttggagtccagggctgctgggctgctgcagtcttcctggggctcatactctttgacttccaaagctttgagtactatcgaggatgatgttcttttcaataatgccactgcctcactccggctgacctctgtcagttcgaccccatccacattcaacaaaatgtcacctgatggccagagaagcagaagctatctttagtgagagcacaaacagggacttctgcttaaagtgcaaggggataggggctgactgggattgcagggatgcagagagggcaaaggttttctttgttgacgggaggctgggtgctcacatagcaaatggtaaacagtgtgtgcattccaaggtgctgttaagacttgtttggggttttctaaagcacagctatcggtgttttacacaagaataccgctgaaggaaggaaggaagggagtgagagaggaaaattagtcttgttcactatttaatcaaagaaaacctactttttcactcttttgtttcttgtttttagcataaagtaggaggatttggcaaaagctccagcatttgcacggagccaggcatgtagtaggcctccagtaaatatggattgaatgaaaagaaactacccatgagagtgtctggcagaggagtcttggagctgcactcttaaagaagcagaaagaaaaacattttcattgctaaggtgaaaatagctactattggttaagcgcctactatgtgcaggatcatttccatatagatcatataatcctctagcttatgttctgttaacaagtcatttgttaacaagccactttgtttggcctcatcattttccacccagatgttttgcagaaaagagaaattaaaatatacatctcccctatttccattttctatttttttatcttcatcctgtttttttctgtccccttttgcttaactttcttatacagaataaccacagcaagagcaaaaagacaggaggagaaaaaagagaaaggccttgagtcctttctgacccgaaagaagcatctttcagacagctgactaaatctcttaagataccatccccctgtggctcctcaggctcagcagctgtacttgggaaacttcacagtttatctcttgaacctggacttttaaatggcataattcctcacccatctgagctacctaccctcttgaatgaattgacaatattattaaggatacatatttgtagaggcaaatttgatatcatcttcctttatttactcaaagtagcccagaatacatgagcttaaagtagtgaaataattttcactctgggaaagtatccagcatgatactttcacttaatgagtattcattgaatcaaatctatcaaatgactttttctatctaacccatataattgaataattcatgaattatttcatgaattccaccaccggatcaacccactaaagaaccacttagaatgaatggaactacattatgccatttaatagaggtaacttgctcataactgtagcagttctctattaattcctggaacagtttggagattctagctttacttgcaggcaagttggcctgcaactaagaaaagtggaacctggtctagtatctatactcaaaccaatcatggtcaatgggtaacaaaagtcctggccgatcactcccacattctctcattaattttgaaaatagtcacctaacaagctactaatttctcttgattctctgccaccccagtgcctttaaaatccctttactttttacctgtttttattcttccatctctgcttatgactcctccgggctcaacactgatgacatagataggcaaatcccattctctatgtgatgctccccctgcgacggtcatgccgagagattcaccggggtctttttggatatttaccaccttctcatgacaagtaattgtaggatggaggggctgaaggcacagatggaaaaacatggcacatgaattcacaactctggtagtttttgaatgtagaaaatgcaaagtgggtttccattttctaaatgcaaaaattaccaaagctgcataaattatgcaaagtgcataaatacaatggtggttcttgaaatcacagagaaagacacctggaaagaaccctcaccttatccactcccaaccataatagggttacattgtcccaaattctacaggttaactcagataaagtttacacttcaaaaggaaagagtaaaaatggaggaaggaaccgattacagaccattagaaaaatatatttctaaaatattttcatagagaaaaagtattgctttgttgctcaggctggtctggaactcctggctccaagtgccttggcctcccaaagtgctgggattacaagcatgagccactgctcctggccatggaggaatcttaagcacacagagtgaactgcacccaaaatttctcaagtgagtcatttattcctgatagtagtgagtcagcatttcaaaaacactctgtcatttataaatatcagaaacttttctatgttaaaaaaaagtaaccatattttatagagtcttctttcacacctgctcagtgcttaccaggcagccttgcctgcggtgagcaagagatgtttagttgtgcactgaggggctggatgcaatggctgaaataccacaaatatggcatgtgtgcatgtgtcctgtctcatgaaccagtgtccatgaccatttcctttcttaaccagaaaagcgaccaatgtcagcaatggaaaaagaaaatcatctgtgaaagcttcacacccagggttacctgactttggctggagaggaggagagttacgtatgaaagagatgacttttctatctatcttttttcgccattctcctcaccctactttggacaccttacaatgttccttgatgtttaaaaacataatttatggtaaaatagtttaagctaattaaaaacacaatgggtacctgaatatttctcaaactataagatgtatttccattttagaatatttgctttggatatttagaataaaacattttagacaagtaaaaaagcataaagaataacagaatgacctacccatgtacctcaaaaccctacatcagaaataaacattccatgtgcacttagtcgctctatgactctttctgctcataggccttgcctccccacagaggtaaaccatgcaaaatttgatgcctagcattccttaacttttttaattggctaaaagttttctgtcccacaaatcctgctttgtcttctttggtatttctttgaattgtttaagctcttatttttaaaaagctacctggtttcctaaaccaaacaagattttagtaagaatataaaaactgaaataatcaaagagccatatatgtctcagtttttttaaatatgttacttttttgtgaggatatttcagaagtcagatagaatataagttaaaacggaaataattacaattccgactaagtcagtttgcacgtttccaggaattaagacatatgacagagggttgcagcagaaatgtgaccagatcctcccagctctttcatgatgaggaggtggaaggaattctaaaaccacagtgcagatggaggctaccttctccataatttgatgacttagaatatgacgtattctagttaattcaactaaaattagttaattggataaaaacttcaattaattaattaagctaataaactagtttttcattaataaagatgatcagttaaatttaaacattaagcatttactagcaaaaagacatcacggagtccttatccataaaatgttttagcaggatatatctggtctgtctagactccttattgtagagaaacaggtaatttatggatttatgaggcttggctggctggagaacctggaggggtgtataaccttgtaggctatgtaattaacatagtataaagcagagatgttccaaaataaaaaatttgaatattgtttctctatatattactcaaaaactcaatttgtaagctattccaaccaacatatagattgacgtagaaagaaaagggcattccctactttctgttgcaagaagaatgagctacctttaagaattttttttagttacaagtgatgccatgaaaccagaactcaggagagatgactgaaagaagctcatcagcatcacaacaggatgccaagccaaagctataggactcttaatttggactaaacaaggtttgtgttgcttaaacacgcatccaaatgaagaggttaaggcattgcctctaatagaagccacagagagaagtacaaattgggctgagtcacttcatttaaagtgaggctgcaaactggtggcctgaagaatgaattccacccacagatccacagtgttttagagttttctggatttgaatgccatataacatgtgctctctggtttgccccaatccccaccactccctaatgttacatgagcttcaagtgtttaaattatcttcctgggcccttcggcaaacacaaacaaaaactaaaagtagcggggaaatcactcatttctaggcagactgaaaaattcaaaagccagaaaccaggcaaactgcttgcttcatttcaaagtgaataaaataagtcctcaaacaagatgactcttggtaaaaacatgccatttatttggcttaggctagaaatcaggtccctgtatgaggtctgcatgatcaggtttcaaaactttcctgcaccttcttctctcctgcttggatgggagacacctgttatctctccaagtcttaaatatgggactttgggcttttagttttacaagtcaaagtgtttctttaagtaaaaaagtccagagatgacacttagacatgttaaaacaagcagccttcccaagaaatagccccttgcaggagcaggcgacctgccctagaggcctcaccttgggagtgttgctcctctcccctggccctggggaccagctgccattgctgttccagccggcttcctgaaagatgtcagggctccgctgccgaacctggcgggacacgacgaggtgaacacgtctttcactggcctgggcaagaagacacaggcattagccactgtcagtttccatccactgcattcagcaccaggagcttacaaaaacatcactttgattataccatttttttatggcaaaacatgatttctagtttgttgggtttttttgttactatccatcttgtaatttgccaagagcatgagagctctttcctttatccttaaaccaggtagtaaatgttgctccaagggaaaactagggaaggtttggttccttccaatctttgaaaaggcatcatcagatattgctaattcatttttaattaatggttgtaccacacacaagccatgccctaagttcttcccagatagaattaggtgcactgtgtaaagtagcagcccaaagcaaagatctaagatcaatggtacacagtaaagaaaaagagatggagttaatggcagtaacttgccactgcaggaagagaaatcctgagcctgacacttgcaaatatttgggcataggaaaggtttagcactttagaaatatggggatgacttcatacattaatatgtacaacctaatcaaaatcctttaccttcaattcacaatcacaaagacatggaatcaacttaagtgcccatcaactgataggtagataaagaaaatgtggtatgtatataccatggaatactactcagccacaaaaaagaatgaaaaaatgtcttttgcagcaacttggatggaactggaggccattattttaagtgaagtaacagaggaatggaaaatcaaatactgcatgttctcacttgtaagtgggagcttagctctggagatgcagaggcagagtaatataatggactttggagactcagaaaaggggagggtgagtggggtgagggatgaaaaactgcctatttggtacagtgtacactattcaggtgacaggtgcactaaaatctcagacttcaccaccatacaatgcatccatgtaaccaaaaaccacgtgtattcctaaagctattgaaatacaaaatgtttaaaaaactgcaaaagagtaatttgccttgatttctttattttttatggaactaccagttactctgctaattctctctgctatgtacattgatatttggacaggcattcagaatagcaaatatagtacttattggaaaggtccactccacatcatcgatatggtttgactgtgtccccagtcaaacttcaccttgaattgtagctcccataattcccatatgtcatcggagggacctggcaggaggtaactgattcatgggggtgggtctttcccatgctgttctcgagatagtaagtctcacgagatctgatgattttataaatgggagttcccctgcacaggctctcttgtctgccaccatgtaagacatccctttgctcttccttcatcttccaccatgactgagaggcctccccagccatgtaaaactgtgagttcattaaacctttataaatgacccattctcgggtatgtctttaatagcagcatgagagcagacaaatacaatgatacatttacaaattgtctttctgccacagattagtttcacatgtgtcaggtagtatgggccattattccagaattgctgaccattgagatttcagagctgcaggtcattcagactaaatcttagacctatgaaactcacataaatagagctctctggtggcctaggctgaagtagccagctgacctcatttatcactttagtaaaagttgaaaatgaatgagatatggaagatttgattagaaagattcccaagacagacctggtttagggacaagggagatggaagagagaggagtaaggtttggtggttcctctcttcatcccatcccttgcccactcaccaccacaacagagaaggggcagtgacctgccagctttcttcctatacagggatggttattgggctaggggagaaaggtcatgaaatgagggcattgaaattccatgctcttttgcattgactcagacaatggtggtggagatattttcttcctgcctgctatggtctgaacatgtttccccaaaattcagatgttaaaatcctaacccacaacacggcagcatttggaggtagggcctttgggaggtgattaggtcatgaaggcaggtccctcctaaggggattacagcccttatgaaaggggctggaggaatcttgtttgcccctctaccatgtaaggacaaagtgagatggtgccatctgtgaggaagtagccatccccagacaccaaaccggctagtgtcttgatctttgacttcttgacctccagaactgtgagaaataaatttatgttgtttacaagccacctaggatagtgtattttgttatagcagcatgaatggactaagacaatgccttttctgcatcttcattcccagagcacacaactcactcactctcaggaactaggaccttgttttaaaaatctcaagtaaacactttgggaggctgaggcaggcagatcacttgaggtcaggagtccaagaccagcctggccaacatggtgaaaccctttctctactaaaaatacaaaaatcagccagtcgtggtggcaggcacctataatcccagctactcgggaggctgcaggaggagaattgcttgaacccagagggtggaggttgcagcgaaccgagattgtggcactgcactcaagcctgggtgagaaagcaagactccatctcaaaaaaagaaaaaaaaaatctttagtaaaaaccatccaccaatgaaacaatatccctatggttgtctgacactaaccagtccaaatcttcatgactttgcactcttataacacttcttctcagggctctcttgaaacttaggggtcatgatttgggtggctgtaaattaaaggaacttttagagacaactgctagcgtacagtaagagtgtctattgtaacatcaaaatggatgatcggccaggtgagttgactcatttcacaaaaactagaaaatccttctgaaaagggcccaaaaaagaagttggagtcctctgcccatgtccttcacacaaagtctggccatcacttctgatctccccagacaaggctaatgtgcccttcctttgtttacctatcttgaattccctggtgtttctcatcacatataaagcttgtgtctgaacagaacaaaaataaaaagcccaggaaacaatcgtgaagaaagctgacatgaagaacgatggaattagctgactaaatccaattcttggaagagtattttgtaatagctgtgtctttctttgtactataagcctcccttcttctaaataagattatctttgggaactctctaaagcaaaacttactaaaagataagaagtggtgaacattcaggtcaaaaccccaattactgagctcgaatttgctctctttggggaaactccgatgttttgaaggatcccagcagagtgtccataggcttgcaaattgtatcatgttcattttggatgaggagtagccacatgatctaagcacctcataagaactgagaaaattttagacttgcacatcgaatcaacttgccaggcaaaatccaaattgccaaggagaagcctgcaagaactatttaattcacattttcaaggacaaatttctcactggattttcaaatgctggctttggtattaagttgttgacaggaataacactacaataaataattctggtatcaatttacttggaaagaaattctctgcaagactggatctgtggctcttaccagccaccttgtaaattgctcacaggaagactttgatgtacttttgtggtgtttgaagatataaggtggaaaacgggctaatatgcttgtcctggctttaactcctatcaggagctggattcaatgcagagaaacatcccctagcaccagagaatctttctttccactagtatcaatgtggtgtgagtgtgaggagggggagtataggggagacacagaaagactgaatgagaaaatggcagaaacttgtttatttcacacctatgtgatatgtaccaagaaagtggatacagcagagctgtcattccagcaagcaaggaatagcttactgcaagaaagaggtaagacagcttctctcttgcatctcttgggatgttgcaatttgggcaaaaggatggtttaacaatggtggctaccttaattagaagacatgacttaaagtttcctctcctctctcccttaagaatcctagattgtgatctaggcaaattctggacacactggttacaacctgcatagcttgactgctgtaccatattctttccctcccaagagctgaagcattagactccctctctcttttccgccctgcgccagttcacccctccttaggaaacttggtggtcctccgctcctggcagagcaccatattgatgccaaacttagtgaagccacccaatcggcagagcgcactacagccccagagctcctgagctcaaacgactctcccgcctcagcatccagagtagctggggctacaggcatgccacttcacccagcatccctctcttttttctacaggccaagaggaagcggttctgatgccatccatattctcccctgtggactttagcttattggcagcctcctgacaagcactctgtccccaaggctgatctgcctgccctgggcagacaacacactgggaaccttgaggacatggttcctgccctcccggaatgtttcctactgcagggacagtcagatgggagtgccatgaaagagaaatggggaatatacttaagggtctccagaggtgggaccaattacttctggctgaggaaataggaaccatctaatattcagagaaaaaaaagagggttaaaactaagtagcgtctgtatggaaggactggctttctgtcgttttgtttaatgactgcttttctctgttgagatttgactcaaaattgccaatcatatttatatgatggaacttagcattttgcagagctatacactggagcacatggcatctttctactgttttggcattgcatgaatccatacagtgactaagagaagaaaaacatagtccagaagcctcatttatatgtacccatctttaaataacaaagcctatctcttatagctggaaggagtctgggagcgttgcactgtgacctcttgccaagcaagcatcttcctttgtgttcagcctgcaactgactctttctcttccaaaatccactatggctgatgaaaactgctcatactgtcagggcgtaacatagatttgcaacttcccagagcagagagatggaagtcaaacatgccaccacacaaggagcagcattttgcagagctgtacactggagcacagggcatctttctactgccttggcattgcatgagtccatacagtgactatgagggccagtgaaaacgtacagggggagtaagaactggtcaagtacctgttctcatccagccaaaggcttcacctgctcattggcagagacagattggagttaagccaaatgcatgataacatttgctgcctttttgagatataggtatatgcttaagtaaaatgtatgataaactatataaaatgcactgggttcatttgttattgtgtttcttgtatcagttttataaagtttcaagttaagaaagttaagagttgccaccctctccccacaatgccccagggtattattctatacacacacttgaaaggagactccaaacccactgctgggcatcaggaccgtgttgttcaaagtaggcagaccatgtacatagcttcctttatagcatagccttggtccacaggagactcatgcttgattgcgtgggccccttgttacagaaacaggtgagagctgtaatgcgactgataactatataagctgcttatagagctcgtcctctagggtttcatcatcaacatattttacattaacctgatattttaataatcacttctttaaaaaatgtattctgcattcctcattggtttcttttccaagtatctcaaaatgagacagtttggctttaaatgatttttcaacatatgcttgtggggatggctctttctacactgtctgtggttgccccattttagaatcccttccagcaactgttcaaatatcattctcagtgaatccatcttgtgctcacaaagccctgggaaattgtgaaggcactggttccataaaattagaaagtcacagacacacaagaaatgtcagacatcatctcatccaacattttctctatagcctataattcaatttccctacaaattccttgccatgttgtcacccagttcatgcttcagtacccccaatgacagggagctcactgtgtcccaaggcaacattggccatttttagatagcactaatttgaatgtttgtccttaggttgaacttaaatttgccatcctattgcctgcctattggtctagttatgcccagtagggcaaccccacatcaatttccctgtgacaatcctatttgaggatcactctcattgctctctcttagctctttccctttccaggtcaactattcctagttttttccacattaaatatcttttcaagtcatctaaaaaatgtaataagttctggactcgctgtaataaagttgtgtgtgtgcacatgcagaatagaacccagaagatgagttctggactgaccagtatagagtgcagtagttttgttgatgaaccagctgcactgaggacctcattaatggcgtttcaattttgtcattcatacaagcataggggattgtctctatgctctatgaatccaaaaactcaatcgattcctgtctttacctatggattaattgaaaggtgacaaggaggtattcaggactgcactataggacaaattatagcagagcagcccacccctgagaccacatgatgccatacagaccttacatgacaatacagacaactggaagcatcagaaccgaatgatatgctagaaaaaaatcaaagtcatcagtcattccggttgatatgtcagtgtatttcacaacaaggtttggaaacagaacccttccccttcccttccttccagtgaacaaaagaacttccagggaaaaaaaatcctcccactgagcaacgagttggaggctccagaaatataactctagaatgaattaatggtgtactataagttgatattccctataaaatgagtttggtcagagcaaatctggtctgtattaatttgtttgccattgaaactttggacccccagaaaagtgcctgatatattattaaaaagtttatgagtatctcatgctgaagaggtggtagctccttcaatgagctaaaagcaatcagtctggccaaggagagagaaaattaaggaggctttgaagaaacatagtaaataggatcttaagatttgatcagggtggaaaaggagaattagggcagcaatatggtttatttttcccagtagactatagctccatgttcatccttatgttcccagaagcatgtatctttagatgcaaagacattaatgataatacagatggtgacttatatggggtcatacagatgtcagtgacaagggcaagacacaaggatttagttcttgagtccctgaatctgctggtggctgagtcagtaaaatgactcagcatccttgcctcagacaccatttcttttaggatatctagaagttactctcatgattatgttctataaaaatatatatatttggggggatatgtgggttagaggaagggtagtgaagtttcaagatcccctaatatttgcagtgtgtagctgcacataatattcactcatgaaattctaagttgaaaagctgtacagtttaccaagtcacacactttatcaagaatgcataaaatttggagccctagataaaaatcacttggactttgagaattcagctcaaggagattaaaaaatattctataatcaagtctatgtgcattaaatttaccacaaaccatggtaagacaatttatttaagtagggatttaattccagattaagtgtactgatctgttaaaaaaaaaatacagatctatcagcttttatttcactggcaattcttactggctccgggggacttgaatgtttacagtaccacaaaagttctacccttttttgcaggtatggcaatgcaaatagtccattattggctttgtggctctgtctgaaggtctatctcattaaaaaaaaagtttgaagagcctgttgtcaaatgttctttgatgaaatgaattctcatttaaatattgattcatataaggaaaaaacaattacacatatgccggtattgatgaaagcccctattatcattggctctagaaatggctttgagtattttcagtttctgcatcaagtctggaattgcctatggaaaaaaggcttaagagggacattcaaatttgaatctttggtccattatttctttgttctgttatcttagctatgacatcagacagttccaaaaagctgcctctttcatacagttattccagtcatgattgggaaattgacttgagaaattgacaatggagaaaaataaaattgtacttagtagctacataaatcatcagcaccatatttgaggcttctatctccataaggactttcttcttaaaagggcctggcaaacccaggctgctgctgagtaagctgaggttagagctcaacatatgtaaagctggtcaaatataaaatggttgtggcctctctgtaataactcttccctgaagtaatgcagaaaaaaagctgaatgtggggtactgtgggagagaacatgaccaaaaaacatgttgtctgggaatttctttgtaaggcaaatgtgattcacggagtagacatacaaaggcaacatagccaaggattggttagaaatttgagtctcaacatttgaagggtatttagtttaatcccctcagcctggtgtgtgttacaaatatcacataaataaaatccactcttcagaaacggcatgcgattgcttagctaggtttttccaacattccgtgttttccatttctttttcaactagctttgctcccatttttttttaaaaggtttttcctgcttataaagcacgttggctttgtttagtaagcaaaagaatcttttaggaagtcccagtgttaggcaaggttttattccataaattaactttctcagggaagaaactgtttttgctcttctgttattaatctacaaaagcaaaatgccatatgtagtcaagatttttccaaatgacatgatgagtaagagtttttcttttgcttattgcgaagtatagttggcaaacattatctccaggatgtgagttgcaccgattgacctgcagagggagttaacaagtgtaacatgaaaaagtactggtggtcacctaaaaggctagttttcaaagtgagaaaaaaaaaaaaaatcttgctaagaatgcagtttcttcataaagaaatacaatggactctcccttttccatgtgtgaaggttttcataaacatagcatattttctcttctcattgattggccggctaatgccacctgcctaatgctgacttggttcttttgagataaaaggcaggaatacattccaagctctaccaggccaggaactgtaccaacctagttcagcatggtaccacacacctcttggcacaaagaagttgctcagtcaataatcactgaacaaattcaaggagacaaagagtagatatggtatcttggggacaaatggcacatgaaagcagatttggtgcttctttggtaaatggtttgataaccaatccctaggagataaagttaatgtataaaatatattttatatacacatagatgttcataatttgactccatttacttatttggcaaatatttatcaagtgcctactattgccagccattgctttaagtgctgaggatacgatacttttttttgtttgtttgttttttgagaaaagtttcactctttttgcccaggctggagtacaatggcgcgatcttggctcactgcaaccttcacctcccgggttcaagtgattcttctgccaagtagctgggatcacaggcgtgcgcccccacccctggctaattttgtatttttagtagagataggatttcaccctgttgaccaggctggtctcgaactcctgacctcaggtgacccacccgcctcggcctcccaaaatgctgggattacaggcatgagccactgcgcttggctgaggatataatactttactttactgtctggcaggtaatattagttggtagtaattgaagagtattgtaggataaagtgtatatgagcagaaatggacacaattcttagtagaattgacagtgaagagctctctgacagttgagaggagacctgaatgaactgtgggaatgcagcaaatggatatttagaagattcttccaggcagaggaacagcaagaatgccaggcctgaggcagaaatgcttgaagagcaccaagaaggcaatggggcacatggttaaacatggggagaatactaaatatcctcttctgtaagaaatgaggttggagagagaacaggccacaagacgtatggcattgcaggccatagtaacgatctgcaactttaacctaagtgtctcaggaggcctcagagggctctgagagagagagagagagagagagagagagagagagagtggcatcctgactggagtggtttggtaaagagctcattctctctgctgtgcatagagtaggagagagatgattaagtgtggaaggcagaaggccagcaaagaggctccagccgtcactcagaccaggtcaaaatgggttgggggagcaagacgctgaggtgagtcaaagttctttttggttcaagtcactgggtaaatagaggtgccatttttatagactaggaatggcctaggggagagcacgttgggcaaggggtggaatgggaggagccaagggttcagttttggacattaagtttgagatgcctttgccttatccacaggaagatatgaagcaggcatctggaggtgcaagtgtggtcagaggagaaggtgaggtgggcacatgaatttgggaatagatggcatacacctcagaaggaaaatgtctctttgtttattttttgagacagagtcttgctctgtctccaggctggagtgcagtggtgcgatcttggctcactgaaacctccgcctcccgagttcaagcagttctcctacctcagcctcccaagtagctggaattacaggtgcctgccaccacacccagctaattttgtatttttagtagagatggggttttaccatgttggccaggctggtctcgaactactgacctcatgatctgcctgcctcggcctcccaaagtgctggaattaaagatgtgagccaccacacccagccagaaaatgcctcttctaactctggttttgttccccacctgctctacttggcatgagctcgggccctctagggcagatgagcatccatgggggccgagaaccaccttggaactgggacaccaccaagtggcacagctcaaaagctaaggtaccacgtgtgttttctgccctggtgggcagagggagaaggctaagtccccttgtaccctctgcctcaggctgcccaggtctacaatgacagtaataccatccaacacttggtcctcttccacgaagagggataagctactgtacaggacagtgcagagagttgccagcacctacctgaaagaatcacataaccagatctcaggtgcaggcaaatttatttgtgtttagataaccaagtccttgaaagcaaacagtcttttgatgatcaccctctgtggaacttggtgcagggctagtcagttactgctgctgacttactgcctattctcaaagtatgaagacttcagtcactaagtggaagttgacatagacttgctggataattgagaatgcttcttaaggccgctggatcttgcccttctcttttcagctctccactgacttgagagagatcattctagaagatcatgccatttcctttcctaaacccttccaagaatgcccccgtggctttgcggataaagtctgaggtccttagcatggctcgcaatatttcacatgatctgtctcttgcctcgtctatggctgctttttaaaatacacaccccaggctccaggtactatttatcatttccctaataggctgatatggtttggctgtgtccccacccaaatctcatcttgaattgtagctcccatcattcccatgtgttgtgggagggacccagtgggagataattgaatcacgggagtggtttcccccataccattcttgtggtagtaagtctcacaagatccaatggttttataaaggtttccccttttgcttgaccctcattctctcttgcctgctgccatgtaagactggcctttcaccttctgccatgattgtgaggcctcccgagccatgtggaactgtggatccattaaacctcttctttttaaattacccagccttgggtatgtctttatcagcagcaagagaatggactaacacatgggctattaaggaaatgttcttttgtcttgtgtctccttaggatgacccttgctgacttgtacactggagaactccagctcattcctcaagccccaagttcaagatcttcctcctctgaggaattcacaggcctagtcaagcaaaaatctcccctgcgcctgcatcagcatcatacttaattttttccattgcagcagtgttagactgcatgggcagtcatttagataaagtccagctttcctgccacactggaggatcctttggaagaataatctaagtggtcctccctccaatttctgcatctaacccaggggtacataagcagcagaacttaacagatatttgctggatgaagtgaatgaatgggttagaacataagagcccagaacaaagtctattcttccaagaataaagctcacagcttatgaaacgtcgctgagacacaaaactatcagaacattataccgggtgaaaaaagccagtcccccaagtccgtatatgatttcatttatataacattcttgaaattcaaaattatagaaatagaaaacagattagttatttccaagggttaaggaggacgtggggcggggagggaaatggatgtggcaatagaaggcaacttttatagggatctttgtggtgatggaaatcttctgttatgactgttaatgtcaatagcatgcttgtgatgccatactatggttttgcaagatgttaacactaggaaaaacagtaacgagacatgggatctctctgtattatttcttacaattacatattaattgataattatctcaaaatacgaaggtgagttacaattgcatactaattgataattatcttaaaataaaaaagctaaagaaaaaaaaatttcaacagtgaccctgacgaagtcaacaaaatacatacaggtgcttgatgacattatactggtcagaaaagtggattagtttgaacagtcatgaactctacttgcctgagtgatcaagaatttgcgtccctctcttcttagggggcttcctctcaggttcatacttgggtttccaagtgctttcgaagtcacctggacttagccatggagactaagacttactctgtccataggatccctggagaatgcatggcatagctttttttttttttaagatgggtcttgctctattgctcaggctagagtgcagtggcacgatctcagctcactgcaacctccgcctcccagtttcaagtgattctcctgcctcagcctcttgagtagctaggattacaggcacctgccaccacacctggctaattttttgtatttttagtagagatggggtttcaccctgttggccaggctggccttgaactcctgacctcatgtgatacacctgcctcggcctcccaaagtgctgggattacaggcatgggccaccacgcccagccgagtaatgttcttacctgggcagaagctttgaaaatgttggtctttccatcctgactccttgaaagggaggcactgcatgacacatgtggtagtgacagggtgcctggttcagggggatgtgcattcttgctcatgtccggggtttctgactgggatcctggaatgacctctgactcacctgaatcagatgagccgcactttctgggctgccatatcgaagatcatgtccattgatggctaacacacggtcattctcctcaagctgaccatgtcgatatgccacaccgccatccagcacattgaagatgaaaaccccaggctcatccaccttgcgcaccagttttattccaagctgctcctcggggctacttttgttgagaatcacatgaaagctgtcatctcggggtctgtaggcatccggggcctgtccattgttcctgctgcggaacttctgttcacgcatcacagtcagccacagcacctggcagggctgccgcaggagacgcacagcgtagttgtgagggacattgctgatgtccatcccgttgacctgggggcaggtggaacaatcgtgcggtcagctccacctgccacaacccttcctgaaagatccaggcccacagaaaagccaggatcctgtctttaaagactgctctgctctcccacctcatcctgtgtccaataaccgcaccttccaacagcgtttctaaccctgttctctccaagcgtggcctgcagcacctctccaggcctctgtgagtagacaccatctttctccaccttgttcttacccaagcccacatatttattcccagaatcctagccttcatttctgttgtcattattttttagctggcaggaagagagggaaggaagataaggtaggaaaaggcaaaagaaaagcatttttcccatttgcctcagtcaaatgattgcattaaacagctcttcaagccgagttgacattttcttcccaaaaatctccaattgaatttttctccctgggtcaactcataccagaacttccagtcctcaccactgtgtgtgtatgtagatgtgatagtgtgtgagtgagggtctgagtgtgtgagcacgatggagtgtatgtgcgtgtgatactgtgtgtgtgcggatgggaatgtgtcaggtctcagggtggtcccctgcaaggtttttttgcccatgttctcagcaaaaggaagaaatccttgcacagtttcagacaaactgatatgaaaggaagtttccaggctcttttattgaaaggctagatctctttataaagctacttaaacaagcttaagctcggccctctcatttgtgcctcactaatgatgtgtagggctgatactgcatggggctttctggttttaatttctctggctacacaggcccagccagagccccctatgttggaagaaaacaatttcgcagcaattgctgcactctgtgtttgaggaaagaggccccatggaggagaaataactttcttgaatttctgtagtttgataagatttcttgtatttgcagccaattgttagagaaggcttggaatgggctttacaaaggcctttcttgaggatataatcacctgttctctggtgcagctccagaggctccctcatgcaaaggcaaagctcaccacctttgtccaagcacaggtgaggagagcacctgaggtggcagggccgggttcccccatcacctctgggcccagagaaggtcaggggagtcagggttgcctgctaaatagtcctggcagcccttttgtttgtaagctccagttgaaggccacaagaatcaaaatgttttgttatgcaaccctgccaggcagcatagtttccactagaactgggaggcagcagtgcacagtgtagctgattgtactgcggcctgccccgagggccctgtcttatgctccacctcggaggccagcaggaatttcagtatttctgtgaaaactgctttaggttatttctcctcttattccaatcagtttgccaaagaaacagctcataatgtgacaggagccggtccctcagcaacctagaagggatgggatagaactgttatctgagtgtcagatagaaaatatacgagcagggaggggtttcttggcacttttggcaaacattggacttctgcctggtaaacagatctttttatcctttctgttctgaaaattcctccttctccttaaccaagcctctgaggacagtaacacccaaagcattctattccaacacctgtctcccctggtatgtctctgggttggtggaattagcatagagattacttttattttcagggagggccgtaagactataggaaattgactttcaaaaagtagatgattgtgattaaataaaatacaaaatgttctattaatctactctaaaaacaatttaagaaaatatatgtcccagttttattttatattaatgctctttaaaaaaagagataaaaggagaaagaggaggtggagaaagggaatgaagaggaagattgaaaaagctagaagggagaaggcagaagagtggacagacaaaatgatatagagacagataaatatttatatacagagagaaaggggggagagagtgaaagagcaagacagagagaaacaaagatctcaattaaatgacaaatctcagagagtcataaaatgatagaaagtcactatccacatttattttaccatttccctcattcatccatccatctatccaattgtttgctcagaagcatttttttatatcaagccccttgctgcagccccacagccacagtctctacctttagaatgatgtctcctggcagtagccggccgtctctggcgatcaccccatcacgataaatgtgttggataatgatatggaccagtggggtttcgctacctcccaccagcctaatagagaggctttcactgggatctactcgattgatcttgatgctggtaatttcaccatctggaatcaggtggtacaaccttggaaagactgaaatggacaaagagtgtttatttaagacacccacccaatggacctttccaactactcttcttgccaaacttcagtgtcagccaaactaaactattcatttttcctcatacatgttttccattttcctgcctctgtgtcaatgtaagtttctctgcttggaatgtttttcatcctgagcttaaacccaatttttccttcaaggcccttccaattaaactctaccctgattcctccttcccttgctctaaacagcccacttcctataaagctttctagctatttctcatggcactcaacccattattgttatttttacctttttgtttttgtttctgttttttgagacagggtcttactctgttgcccaggctggaatgcagtgtctcactacaacctccgcctcctgagctcaagtgatcttcccacctcagcctcccaagtagctaagactacaggcacatgccaccattcctggcaaatttttacattttttgtggagacggagttttgtcatgttgtccaggctggtcttgaaatcctgagcccaggtgatccacccacctcggcctcccaaagtgctgggattacaggtgtgagtcacctctcccagcttatactcatttcttatatacctcatatcatgcccataaaacctgagggcataaactctcgctgttccatggttctctgcatatatctctgcatgcagaggccttcagctgaagtttactgaattaatagaagtgaatgaatcatttttaatggaatgaattgcagttttatcgcttgcttattgagaggtaaaaaacagaaccaatttgccactttgccctctcagataattttgaaaatttcttccttaaagactctgcttttcaggcttgggggaacatcagttctttctaccagacattgttgttaacaaatggaagaggcctgattcatgatcaagaagaggccaaggcctagttggtggccttgagcagttcatccctggtttgcctgaaatcactgagttcagagcaaggagattcaaagatcatctaggctggtgttttcaaactgtatttttaaactgatgaatctgctttccccaagaaatctctcctagctctcttctcatctttcatcccattgtgaccacacagaaaacagctgctctaattgtcctgctgcttgacagtgatagtcaaacactacaagtgaggaggtttaaggctgagagaaggggagtgaagtaactgactggacatcccaaagttaggtggtcctgagagccaggtcagaacccagagttcttgtgaccggtactctctgtcaggtatccctggagccaggggttcacagccaggccagagcccatgagggacttgctctatggacctatgagccagcagcaccgactggcattgttttttttttcacttcagtttgaatagaagtgttcagaggggacaccaacaagtgatgggaacaagccacacctagcttggtggaaaaaggggctcctccaagcagctagaggctcaagtttgaatgtaaagggctgagatgcttctgtcttccgtaggtgctgacagctgcctcaccttaagagtctcctttcgttatggcatctggaaagatctcacatggcaggcctgcttctagttccttgtgagcattttcaaaacccgtgaccttagtccattttccctaatgaattaataagtactcaactctctaagaacaataaagaattaaaattatttctaagtatgttagggcaaagtaacttagtgggcagaggaaacccgagatgttgtaaatgtgggtccttaatctctatactgattgaactgaagtgactgcataaggcaggggtaagctggcttcagcagtcagctcctggtactaacagtactcgggtgattgagttcaattaatgtttaaactactttggttatattaagtaggctataccacaggcaattgctagaacatgtctggtataacaagggaatggaaaaaaattcattctgagcaaagaaagatttggaaataatcacaaaagccaattttccctccctcattccccttcccttgttaccatcttttccaacagatttacaaaaaccacactgccaaacctaaaccgctagagaatgtttgatttgatagcttgaaaggacataccattcacacttgtaaatgatgttagagcaacaccaatgagatcctagtgaccttaaagagataaaggaatttttaaactgccaaacttgtgttggtctggaaagtaaaaaatttgctcaatattatgtccttactcaaggactaaaggatataatcttattagctgagagtttgttatatgctgacattgagttaaggtatttgaatgcatttttttgtttagtcttcacaataaccctatgaaatagatgataataatcttttttttttttttttttgggggtggggggacaggatctcactctgtcacccaggctggagtatagtggtacaatcttggctcaaagcagccttgacctcatgggctcaggcaatcctcccatctcagaccaagaagctgggagtacaggtgtgtgccaccatgtcccactaatttcattttttgtagagacaaagtctcaccatgttccccaggctggtctcaaactcctgggctcaagagatcctctcactttggcctccaagtgctaggattaccggtgtaagccaccatgcccagacccatctctgtcttttcagatgaagaaatgctgaagcttagagcattaagcaacccagccagggtcacacagttgataaacagtggcgccagtccctttactgacattaaaaggatggataaaccatgccaggaagctaactgtaggttgctgaagcaatgaggccctctggccattttgaaagcattgttgcctcacaaatgctgtgacgacattgataccaggctagctgagtcttaacacctcactccattctggaattacagcttcctagtgtgtctgaggaaatccaatctctcccactccagcccgcctactcattgaacatggctgctatctctgtcttctggaaacacggctccaatcctgcaacaactctatacaagagctcccaggtgtgttcactacccccaaatcaagtacagactcctaaataataatcaggacacactatgatctgaccttcacctcatcttctgtattggtctggaaagaaaatgatttgttcaatattatgtcctcactcaaggactaaaggatataataataattattaactgagagtttactatatgctggcattgagctaagctacttgaatgcattttccaacacacagtcagcatcccaacatccatccaagtcacatggattacactgtcccctatggctgctatggtcattaatttatacttcattcttcatagtacaggcatacctctgagatattgtgggtttggttccagactgctataagaaagtgagtcttttggtttctctgtggttataagagttatgtttacactgtactctagtctatcaagtgtacaatagcatgttttttaaaatgtacatatctcaatttaaaaatactttattgctaaaacatgctgtttaacgatcatctgaggcttcagcttgttgtaatctttttgctggtagagagtcttgccttgatgttgatggctgctgactgatcacagtggtggttgctgaaggttgggagtggcttggcaatttcttaaaataagacaacaatgaagtttgccacatgaactgactctcgtgaaagatttttatgcagattctctgtagaatgcaatgctgtttgatagcatttaaacttcagtagaacttctttcaaaattagagtcaatcctctactaaccttgctgttttatcaactatgtttatgtaatattctcaatcctttgttgtcgtttcaacaatgttcacagcatcttcagcagaagtagtttccatctcaagaaaccactttatttgctcatccgtaagaaatgcctctacactcattcaagttttattatgagattgcaacaatttggtcatatctttttttttttttttagatggaatcttgctctgttgcccaggctggagtgcagtggtgcgatctcggctcactgcaagctccgcctcccaggttcacatcattctcctgcctcagcctcccggaatttggtcatatctttaagctccacttctaattctagttctcttgctatttccaccacatctatagttacttttctccactgaagtcttgaacccctcaaagtcatccttgagaattaaaatcaacttcctccaaactcctgttaatgttgatattttgacctcctcccatgaatcactaatgttcttaatggcatgtagaagggtgaatcctttccagaaggttttcaattttccttgcccagatccatcagaggaatcactatgtatggcagctatagcctttcgaaatttatttcttaaataatgagacttaaaagtagaaattactctttgatccacgggctgcagaatggatattgtgttatcaggcatgaaaacatcattactcttgcgtctccatcgaagtacttgggtaactaggatgcattatcaatgagtagcaatattttgaaaggaacttttctttctgagtaataggcctcaacagtgggcttaaaatattgagtaaactatgctgtaaaaagatgtgctgccatccagtctttgttgttccatggagaaagcacaggcagagtagatttagcataattcttaagggtcctaggatttttgaaatgataaatgagcactggaccccaccttaaaatcaccagctgtattagccccgaacaagagagccagcctgtcctttgaagttttgaagccaggcattgacttctctctagttaagaaagtcctagatggcatcttctcccaatataaggctgtatcatctacattgaaaatctgttggctgagtgcggtggctcacacctgtaatcctagcactttgggaggccgaggcaggcggatgacctgcggtcaggagttcaagatcagcctggccaacatggcgaaaccctgtctctactaaaaatacaaaaaattagccaggcatagtggtgcacgcctgtaatcccagctacttgggaggctgagacaagagaatcacttgaacccaggaggcagaggttgcagtgagctgagatcatgccactgcactccaacctgggctacagagcgagcgagactccgtctcaaaaaaaaaagaaaatctgcttagtggagccaccttcaatgattttagcaagatcttctggaaaacctgctgcagcttctacaatcagcatttgctgcttcgttacaatcagcatctgctgcttcgctacaatctgcatttgctgctttgccttgcacttttatgttatggagatggcttctttccttaaacctcatgaaccaatctctgctagcttccaacttttctcctttagcttcttcacctctctcagccttcacagaatcaaagaaagttaggaccttcctctggattaggctttggtttaagggaatgttgtggctgttttgtttttctatccaggttactcaaactttctccatatcagcaataaggctgtttcgctttgtaaatcatgtgttcactggaagtagcacttttaattcccttcaagaacttttcctttgcattaataacttggctgtttggcacgagaggcctagctttcagcctaccttagctttcaatatgccttccttaccaaggttcatttctagtttttgatttaaagtgagagacatgtggctcttcctttcacttgaatactcaaaggctattgtagggttactaattggcttaatttcaatactgttatgtatcagggaatacggaggcccaagaagagagacatggggaaatggccagtgaagtagtcagaacacacaattattaaatttactgacctataagggcatggctcgtggcacgctaaaacaattacaatagtaacgccaaagataactgatcacatgtcaccataacagatataataatgaaaaagtttgagatgctgcaagaattaccaaaatgtgacacagagacatgaagtgagcacacgcttttggaaaaatggagcaaacagacttgttggctacagggtgaccacaagctttcaatttgtaaaaataaaaatgaggtatgcttttattttattatattttagtcttgaataaaccccttgatgccaagaactacattttatattctttatataaaatgacagcacctaggccggtgccttacatataataatctgttttataaatgtttttgtaataaatatgcaaataaatctttttcaagataactttttttttttttgagatggagtcacccaggctggagtgcagtgacacaatctcagctcactgcagcctctgcctcccaggttcaagcaattctcccgcctcagcctcccaagtagctgggattacaggtgcccgccaccatgccctggctaatttttgtatttttagtagagatggggtttcactgtgttggccaggctggtctcaaactcccaccctcaggtgatatggctgcctcagcctcccaaagtgctgggattacaggagtaagccaccacgtctggcccaagtagtagagaactttacatggagtggaattgaagagtctttaataagaggaagagactggtggaaaggaagttctaatcttttcatttagccattgcacagacatttagtggacacttatgtgccagacactgtgctaggccttaagaacaaagattcagaaaaataatccctgcactttgaggtacagttacatgaaacatgatcatcgctgatacaggtgcttcaaaaacacctaaaaagggggctgagggagtgaggtttccaggaggaggcaaagtcttacactaaatctggaagaaggaacgtgaatgccagctgaaaggagagtgggagcgcaggctggataatggaagggaggtgaaagaaagatatacagcatttataggactgtaataagctgagagctgttagagcatgcagcatgtacgtgcagggtgagaggcaatcatgaataagtatacaagaaaaggtctgataaggctgctcatgaattttgagggcataatacatacagtggtttgggttctgcctcccaactcccaagagtagagggcagtataacccaggagctaagagagtaggctctggaaccagaggacctgatttaaaatcttggttctgccattttttagctgggtgactgggctagttacctaatccctctgggtctccgttttctcatctgtaaaatgggaatgatagtcctatccccttaacattattgtcacatctaaatgacttaaaacactatgtgcatgcagaaagagctcaattttttaaaaaagctgttactactactctaaagttctaacataaaatgcaaagacagtaggacagtatttcctcagctccacttatattggggaaaacatatgggatctaagactcaatagcttcctttgcatgaattctacagccatgttacctggattcaaagtttagcaaggtaatttgagcaacctaagtaacctctctgtgccacagtttcctcatctgtaaaacaggaataggagtggcgccaggtgcggtggctcatgcctgtaatcccagcactttgagaggccgaggtgggtggatcacctgagttcaggagttcgagactagcatgaccaacatggagaaaccccgtctctactaaaaaatacaaaaaatagctggttgtggttgtgggtgcctgtaatcccacctacttgggaggctgagacaggagaattgcttgaacccaggaggcagaggttgcagtgagccgagatcatgccgccgttgcactccagcctgggcgacaagcaaaactctgtctaaaaaaaaaaaaaaaaaaagaggaataatagtagctacctcatagggttgttgtgaggcttaaatgaggaaatgcatgtaaaacactcagcaccacacctcaaatgtagttgaaagagtaaggagagcgaatatatatattgcatttattatatgtgccagtcattgttttaaatgtttttcactcattaattataattattcttcctcatatgcataatggtactagcgcctgaaggtgagggtttcaacacttttttcttcaatctatgtaaaaagatgataatactttctgcctttagctacatacgtgagaagtaggctaatcaaagtaaaaaatattgtatacccttgggaagagaggggtcacagaaggtggaaggtgatcagattgcgtcatccctgaagtccccctggaagcccagcccatgtccatccagccttatggggagttcatttaccttcaggggcagtggtgttttcagaattttccctgccctggtcggcatggttggcaactgcactcccgctctttgtccttcgaagaacactcaaagctcgatttatttttttaaatgatctgcttctaatagtggatctctcaaagggccgtgctgaggaatagcgacaggaggaacagtagttatgatttaatagaaataatcatttatgtacatatctgataagatatacacaataagacattaacagtgactacctctgggtggtaggattgtagaatttgcttacctgtattttttaagttttctacagtgaaatatgtacgacgtgcttaaaatcctgcttttcttttttgtttctgggctgaactgaatacaataccacttttcttgagcagcatggctgaaaaattactgacactgcaggagtgatgaatcattaggtctagtttcagcccctttcaccaagtcagattacacacagttttaatgattggaggtacttgcggtttcatttcactttggcgaattggacattgggttcctgccaaaactaccagaacgatttccccttaaaaaacatttacagaactttccacagtaagtattccacagagggcaatcgcaagccaaggagcccattcccggacaaccacccatttgactcacccctagttcggttgctccggccagagtccactgggctgattgctggctgcccgtcctctgccgaggacacgtaggcagggttgtctaggccaggctcgtctgtcattaaggagatggtggcagctgcagaaacctctggggagggagccgtggctgtgaggctcgcacagccgtctggacagccatcttgtgagcgcctcttcctatctttggtcaggccgtagtgggaggcacctttacagctgtaacagaaccagcggggaggtgaagaagagctttggctctgctgccattcctcagtcagccctcttcaaatacaattgaagaatgtataataggcttgttgaacttggaatttgatttgcctgccgctatatcctctcttcccttttcacacatcggtactcaatatacatttgccaaccaagtgaattcataatttgagattttttaaagacgcccactgcattctcttaaagcaatctctacattggctgctggaatgcaaatttattcaggtcaccatggtgtctacatgagtagggtttgaggctggcaatgttcaactatttggtaattcctgcttgctggtgtttattttgaccatgaaagcccttagtcacaccctcactcttcttttggattttgttcccagagcactgaacgtaaatataaagctcctcccagattccatatttaactgttcatgcaaacagaatcaccctcaccacaaagccacaggagtgagttcagcattgctatcctctagtggcagcttggtggcttccattctctttctctgggctggtctgggagggcctccctggtgttgggggctcccatgatctgagaagtgtcattcattgccatgttgtctaccattaagagagtaaaacagcttttgtggtttttagcaaaaacatatttgtctctacccattcactatccatgctataaaaaaaaatccagaaaactccacaaaaaccaaactttgtgagaaaagcaagttattggtgcaatagaaagaagttgaaaaagaacattctcgaggctcagaagaccaaggttggagctgatctaggtccatattttgccatgaacatgaacactgccactcggcaagtcattgcagcgcacaggctaggttttggtcaggaaatggtgatttaactatctcactctactgtggggagggtagctacaggtaaccactccagtttccacagttgtgaaggcagaaatcatatcacgagcccctttaggaagtgtccatttgcatataatggatgtgttaattataaattcttatcaattcattactcaaaaccctatatgattgagctattttaaatagccctttgagatcctacttcagggatgcttcatgtttttgaaagtagatgaaatcaaaggtcagtctaccgtgatatgcacacatgatttttactgcccatagaatcatagaaatggcaagatggaaggtcctattgtctagatctaaatccttgctctgaaatttacatagctgggtgatctagggaaattttatttacctggctaaacttccaaatttgcatatactttctggattgctgtgaggtttgatcgacattaagtcttatcaggggtttagtactttttgccaaaagtactagaatgcaaattcattaaagtcgtcatggtatctacatgactacaagcagttctcatgagattgtcgctatttccatattttgtacatcctaagatgctcttttcatgctttaacatgtctaaaatcaggatgcatgtgtgattgatggggttgtgaagtttctgttgccaggtggcagtcatgatgcagacgtcaccatcccagcactgcaaacccagtcgcacgagtaccccttatcacttccattgagttgcctacatacttggtattacaccattgagtttaattgccatttgaatgtaatgattcagtactaaaatgaaaagttatagaaagcctcaaaaacagaacaattggatattgatgaagtacatattcattgttagaagcagaatcacaattctgtgttttcttgcaaagggacaagcaaatgttttatctgcttagaaagatgcacccaagggaattaaaagtggtgttacattttgttattgagaacattcaaaaaggattgcctatttcatgccaagcaacacaaccaagggcaggagaagctgccaaattcatctgaatggatttcaaagccacaagagtctagttcaccaatctatgcatcatggggatatctttggtgtttggggattatttaactgatggcacattttaaaatgtcatcttctttgctgttatatgaacatacctctcatagtcagtggcatcttagattagatgaaatgtggttttaatattagtagaaaaggagtttggttatacaaccttatgtcctcatcttctagatgagaaaacaggcctccaacttacactgctagtgcttgtcctcagctggaagagttcaaattcctggcttgaattcgtgaggttttactgtaccgattagctgcgttggcttggaatcattctgtttaaacatagtgaagaggttgatctgggaaactcaaaaattggtgaaacactgtgtgatggaaaaaataaaagccaacttgcatttgagcggctccaacgtaacaaatacttgaatgaaacacttccaggcaggctggtagtatctgattagcagtgcatggaaaggaagttcctagctggtctggaaatggtcttttctgaggaggcagcaatgctcttgaccatgtgccctgccagaatagtaacgttattttccagctggacaaatggctggcaaaggtacaagccatggctttgttgggaggacacagcatgtcctagtaaaagaaactggcacctttctctgctgccccatcaatgggggttacagtattttaaaaatatctgaatcccaagattatgccattaagaaaccattgcactttcaaattcttggggttctaaagataagtttttgagtccaggaaaggaaaacctcataaggtaggtaagtagcctttcctttggtctcatatcacagctgttcttacaacagctggggagggtgcagattcttgatttaagtattcagactcacgtgctttgtgtaataaaggttctgctaatgcaactcatactgtgtaatgttagctttctccagtctcttggcttagcttgagccagagacagagtgatctatgaaggtagcagcttgtacttactaattatctcttttgtggtgactaatactggggcagcttgatttacaagcattaaagatggaagaagcggggaagagctgattagcattggccaggacaagaacatacggtaaaccctgggttgtgttcaaagcaaggaggatttatgcttcctttcagttactctgagcactaagtactctcagatggtgatgggtgatggccatgaacttgaaggatgaatacaaggaacacagaaaaccccttttcaaccaaagcacaagctttggaggtgctgtccattcaaatgagcaactctgaaaaatcagttttcttgggagatcctgagctcttttatcaaagtgagtagaggtaaatctgtcttaatataagaatgttaatactcaatgccagaatttttgtctcttttggggttggaggggggataaggaaagaaaatgaatctccttcctgcaaaacttctgagttcactgctaatgagagttggagacgagacacaggagggaactcagatgtgattcacagacgttctgatagggtatcctctgcaaaggtcacccaacagggcagcgtgatctgggttcccatgaagagctcctttctgatgctgaacttacccacttataatagaataagagttgttcacaaagtgaacctcaatactcaccaacatcatccagccatacgacctccctttgatctctccaactttctgtaaattctttctcttggttcactgttgcattagcaaacattgagtcaactctcactttgggttcattaattgtccagtctgatctgacttcaaacaagagcttgcaaattcatatgctcgtcaggtgagagaatgagggaaggaaggccattggggaccatggtgagcagtgctgcttgacttaaggacacagtggctgctccacccttccctgttaaaaaggctggcccagtgtccctggagaaatttggaagtttttcaatgtaaaatctcttgattttttagatggtagcaagattttaagattcgaaaatcttaaaaacactgtgtggtccaaacaaaacacatctgcaagccagctctagctccagagatggcacattctaatctctggtaattaaaaaaaactgccaacacaagtagatcagacccatttttctttctcagtcctctagaatgcaacactaccctttcctctttctccagtcttcctccctacccagtgtttgtgtgtgtgtgtgtgtgtgtgtgtgtgtgtgcatgcagaggggagatgacccctaaagagggctttcctatgattatttgccctggccccatttctgatccaagtccaaaaatgagactaatttttcaactgtatttctttcacccatgagagcactaatggctggcccatagctattatttaatgagaaagggagacactcagtcctaatttatgtattctttctttcaggcagcgagaatcaagattaggggactctgtagggaagtaagtctccttgccagcagctgggttttaggtattagctgctctactgaatgggatgagtgattctgaaactttgcttgaggtggggttcctggggccaggctgggagactgtgctgtcaggaaggagatggtcactgggagactgaaatgggctctccctgagcactcgggtgagtttgggcctcagtaatgtgtgctcagcccccaactccatctccacggccaaaccctggagctggtcctcctgacaccacatctccatggctttgcaaccaaccctggcctatccctctgcccctggtctagccctccatcctctaccccactgcatcttaaccataccaacaatttttttttttaactcaaaaaccgcccagggaaatgttcccatcgcttccaggccttccctgatccatattatcgatcacggtctcttgcctacaaatctatggcagcccagaaggcagtctggcagaagacagctcatatctattgatcttttttaatgtattatgctttatggatgtggtctcatttaagcctcccacttgtcctattagttataccacctcacttcacagatgaagatatggacagtagaagggagaaatgccttgtccgagttcagaggtggagctagactctgaagccaggctgtgggttccatgctttctccccttatatggcttccctgatccctagactcatatcaaactgcccattccatgtcatcacttagaagtctaatgggcagctcaaacttaacactttcatcctccctgccaaaccagctcttcccacatgttcctgtgttactaaatagctccttatctgtcattcaggccaaaaatctcagattcatccttgatttctttctttctctggataccccaaatacaatccaacatgaaatattcagaatccaactacttttcatcatggctactgccaccatactggtccaagccaccatcatcagtgcctggattatcccaacagtctcccaagaggagtcttgcttccatacttgtgttgtctgcccatctattctcaacagagcagccacagtgatcttttcataatggctctccactttactaaagcataaggtccttacaacgatctatacggccctatattttctgtctgttgtgacttctgacttcctctccatcccttgctcatacagccctcctgctagtcctcaaacttgcccaccatgttcctacttcttcagggcctctgcactttgctgctgcccctgctgcctcagatatgccttccccagattcccatccagtttgttcctgcatctccttcaggcctctgattaaaatccctcttctctgaccacctgatttaaacagcggcttcttttctggcacatcctacccctgcttattttctgtctatggaatgcaagttccaaagggcagggattaaggttctgctttgttaattgttttatctccagtgccaaagacaatgactggcatatagaaggtgctcagtgtatgacttttaaatgaaagaacgacttttgctaatgaaagagcatggggttgtattagtccatttttacactgccaataaagacatacccaagactgggtaatttataaagaaaaagaggtttcatggacacacagtcccacctggctggggaggcctcacaatcatggcagaagatgaggaggagcaaagtgacgtctcatatggcggcaggcaagagggcttgtgtggggaactctcctttataaaaccatcagatcttgtgagacttattcactaccatgagaacagtatgggggaactgcccccatgattcatggatctccaaccgggtccctcccacaacatgtgggaattaggggagctacaattcaacacaagatttgggtgaggacagtcaaaccatatcaggggtgaattatctaaattggctatctacactaatcagatgactcaggccatctgtgtttctgcccagggaaagtaccccccttggactatagcatctcagtgtaaacaccataccatctctgtactcagacttttcaagctaagggacctgaaccatgaacaaggcatggaactatatgtttaatgagttttgggttattgacctcaagagaacatttaactgacaaattaggctaaacattttaattttaaaaaatatttaattgagggacaatattttaaaacctaaataccccatccaaacaacatatttaatgaatctaaatccaaatgcagcaatattttctataccagaaaactgtgactcaaggatatttcacagagagatgggaattaactggttgggggagaaaagtctagttccacaattacaccagtagaaccaaactttgaatatgtaggagctctctctccaggactgagatggcttcctcacattagtgccagagaagtgttggctcatggagtcccacatcacttaaggccgccagtcaagacacatcagctctgccttggctagctggttagctgcgggcaagttgtggccacagagctatacagtaaacatttcttgaattgatctgagcaactgtcacccttttggtattccgttgattgaaattacagcattgggaattgtgggattcactcacaccaccctgataatgcataattacttgtggtcgattgtgataccaatgctagtctctcctttctcctagcaagctcatgagttccctttccatttccctgcacttcaatttaaggcccccaccccaccaaaaaaaaaatgacaagaagaccgacttaagaaactgatctttttttcatgtatttccctggtaattttgatatgattttatttgctttgagtttaagaagcattatgcatgtaataaaactgaagggtaatgaccataacctttctttgatgggttatgctgctacagtgggtttttaatcataatattgaaatacatttttcaataaacactcatgggagggtcttctaagaaagatggcacagcacggaggaaaaagcacatgctttcacttctaaagaatctggatgtgaatcccagatctgccttatggaagggtctcctaagaaggcaactctactggctctgcaactttggacaagtgtcttaattcctctgagccttgtttctcatacataaaatgggcacagtgtttatttaccatgaggtttaaagattcgcacaaaaggccgagtgtggtggctcatgcttataatcctagagctttgataggctggggtggaaagatcacttgaagccaggagttagagacccgtagcaggacccatattctacaaaaaaatttaaaaaattagctgggcatgatggtgcatgcttgtagtgtcagctactcaggaggcggaggcaggaggactgcttgagcccagaagttcaagcctgcagtaggccatgactgggctactgcactccagcctgggcaacagagcaacaccctatctatctcttttaaaaaaagaatcacgcaaaatgccaaacagtacctggaatatatagtaactcagtaatcagtaactagcataattattgtctaacatcaaggcataatgttagacactgtggatgcaaagaaaacgacaatgtatgcacttggttcatgaaaacagaaaaacctccatgccacattatcagagagacagagagggaggtaagagctaagtgtcaggagagctcagaggaaggggctactgattctgcttggggtaattggagaaggcttcttagaagagatgaaatctgagctgagtctagaaaaatgagtgacattggtctagcagactaagtatgagtggtatattcaaaagctccaaggatgcaggtgcatggcaggtgccaggaatggtagattctgggcaggttttgtcctatgtgacaccaatgaggaaagaacagacctgaagtgagatccaagaggagcaacatgttggtggcagtgctggggataaacccaggatacctgatggccagtccatctacctacttctggggttcagtaatcctaaaccatgcccgtgggggtaagagacaagtgggcattgccaagtctgatgccaagacaggagaggggaggaggtttcagaaggaatgaagttgacaacagagggctcgcagtcagctccttgcagagactccctgaccatcaatccaaagtgaactgctgcccctgcctgccagtcacactctttggaaattatattgctggtttgttttctcccagcagaatatagatagcttccatgggagtaaacgtcctgcttttcttgctcgccactgaatcctcagcactctgcaaagagcactggcggacagggtctggcagggtgggggtggttgggggtgttaaaggagcctgagagattctaaaagcagctaattgttttcttgctcctttcattagagtctgtttatgcttttgattgtgttagcctagatatgttttaatagttatgggccaccttgatctttttttttgaaagaaagcagatatatagtttaaatatatgataactaattatttcatgactcctttagtgaaaagcactagaaatctttattgtgtgagataaaaataaatgcatcagtcagcgccttccaaaacagttccacttgcactccctgagcccaccctcaaataggtcctatccctgctaattgagtcctgatcatgctacttggaggacactcaagtaacaataatacaacttctattcatagaattcctctagtcctcaggcatcctggtcctcagcacagacctcctgtaaagaactttccgagttcagtttggataattacgttctacgtgtcacctcaactcaccatacctgcatcttcttaaataatagctctttggcctaaagacattaggtaaagacattcttccttgtttggattactttttctccccttctaagttaaaacccatgttgcctggcactgaattacatggctgctcacatagctaccagaaactgcacatggaaaaaagttatgagcatttttgcgtagtcagaggtgaactgaatatcagttgagaagtaaaagaggtcatcagctgggcaagtccaccatctggtattcagtgtagatccgagtatgaacttgaggctgaatggccctcgccccagaggacaggtggatttctgacatcatttaccaccaaccacacacggcttcccctcattagcccctttcttctgcctccaaactgctgggaaaatgtccctagtccttccaaccaccactgtttcacttgttaatgaacaccagacaggaaaaattcaaaacaagctggaaagtcatgtgaaaatgcaggccaccatcatgggcacctggaatctgtcttggcttgtcagggtgcggccaggagaggcgtgatgtgccttcaaggtagagtctgctcaggtgacaaatggtccaatcccaacctaagcaagcacactgacttggtttaccaaagatgctgacatgttcctatggcatggatcacctagtgctgaacaggcatgagacacactggctagtctctgcacagttccaatttcagggtgagagggaggcagggaagaagtggacattcttccacttaatgttaatgactctcctttaatgccgatgtttttcctatcggtttacagagttagtgtctgtaagaatctgtggctgcatctttttatccttcaaatctcaactcacaaattaatagtaacataattacagccaacacttacagtgccctcaccagagaccacatactgttttacatgcttcctattaacccattcaatcctcatatcatccctatgaggagggtcctattatactcccactttactaattagaaattaaggcacagaaagattaagaactttccaaaagtcacacagctggtaagtggaagggctaggatttaaactgaaggcagagagaactttaattgaagtgtgcacctcaggactgttaataggccatgcaccctggtggctgattatttggggggcaactgtaacatgggacgtagggaaaagcatggaaaattagaagcaggtttttcataaccttatattctttatagacctataaatgccagctactgagtaactgccatgaggaatacaaatggcacaggctggcaagtgagtctgtcataacggggttggcatcttcagcctggagttgacaggcaggagtggtgagcatcacactgccaggcctctgtcctgctttgtcatcagggccatttatcattgctgcatgcctcataggtcagtgcatgggggaggtggttgtggtggtccccacatgcccaggctggctgtctcactgcccctcttcctctccaaaaataattagctccaaacacaggcagcaagcatcgtagaagcagaggcctaaaaggatcttgtctaagtgtgcgggcacctccaggtgatttatttcatccttttctagagaaagcaccttagtccaggcactcatatattcatattcatggtctaaacacatagcatttgaggtgggaaacaggaggccaacttacccatctcccactgggtggggaggtaccctttctctcctgttaataacagcagtcataacagtaaccacctgagctatcatttgttcagttttgttcagtgttttttttttttttttttaatcacaaggcatggtaccaggacttattttatgaaaacttccccccactggttgtattaggcccatcttatagatggggaaaatgaggctcaaagaggttaagtaatttatccaagctgacaaaacattaaagcaaaagagctgaaagagtagctctgtctgagatcttgttgatttaagccctgtgtctgtcaaggtatctgacacacacacacatgcgcgcacatgcacacacacacactccttaacaggcgtcaggctattctgagcactctaccctttattcatttaatcttcacaacaacctcatgagatgggcaggattattatccccagtttgcaaatgcgggaacttaatacaaagattcacttgcgcaggtttgcgcagtttgcatatagggtgaccaaccatctcagattgcccaggactgactggattcttgagacgtgggatttttggtttaaaaactggtcagtccaaggcaaaccgatgtgctggtgctcaccctataagtgacagagacagaatttaagtcaagagttgtgaatgctcataaccatgacatacactgcatctttttcctttgtggatgttctgtccccacgtttagtagaaacagaagctagttttggaggagctttgtggtttcaggtacctcccagtgtgcgctcatctggtactaagatgggtgtccagaatgtcacccccaaactgctgctgaaggcacagcctctcacagcaacccctgcgggtccaaaccttatgcagttgcagggcttcccagggactgaaagaactgattccattgtttagtttaagaagacctgagctgatagcctggagtgcctgataaataccagtgctgctccctggagtgacaactcagaattccaaagccacaaccagatgtggagttgacagtagttaatgagggatggtcgagggcttgggcacagtccacatgccaggtcaattcttcagagacgccagaatcgtttgttcattctgtgagtctctggcatctttggggtcaccgagttcatttcctccatactttggggagggggagcaggcaatttccatgcgacagatgatttgagttttctgttatctgtccatgcattcaagtgtgtatgtgatgtgatggggtgggggtcaggttctttttggttaacttttggtccctgcaattcttggttcaaaattattctgtttacttttggctgggcatggaggctcatgcctgtaatcccaacactttgggaggctaaggtgggtggatcacttgaagtcaggagtgggagaccagcctggccaacatggcaaaaccccatctctactaaaaatacaaaaattagttgggtgtggtggtgagtgcctgtaatcccagctacttgggaggctgaggcaggagaatcacttgaacccgggaggtggaggctgcagtgagccaagatcgtaccactgcactccagcctgggcaatggttcgagattgtctcaaaaacaaacaaaaaaaccccaaattattctatttacttttaaaacacttggagacaaccaaagtctagcttttggtttttgggaaactgggctatggatcaacggtgctttctatttcaggactgactaggaagtgtttttagaataactggaaagggtgggtttcatggtggtgagggtttctagaagtcagaactgactgcctagtgaggttttctgatcagttttgaaagcagcctgggttttcagctgcctgtgatgagctctttttgagtcctcgtgtttttgtgaagtctatgcaaccccaggggctctgcagaggttgtcagagcttgatatcgagatggaggtgtgggggaaggtgaaaatcattcccagacatttgaaaacatttcctccgttcctcaaagtgcattccatcgcattctcagaataaccaagatatctccgagtttgcccaagccccttctgggctgggtgtcacaggccctcctggatatgctgcatgacactcagtggaaaattgtgttcttccttgctcggggtttggaaacgtgtcatgcaaagatagctggttcctcataccaaatatttttacatgaaacaaaaatcctatttttccagccagtttctgtatttgctaaatgagcttcctcttccctcccaatatatttaaaagaaacaaccttactccttctataaaacatattcccaaaaattgtgttatgcaaacgaagggggaaaggaggggatgcttttcctgtttgcaggaaatgctattatattaaaatatttattggataactgaaagctcttcttcttctatcacccttgggccaggcttactctttggttactgctctgctggattcctctgaccccaggctggagtgcagtggcatcatcatagcttaccacagcctcaaactcctgggctcaagggatcctccctcctcagcctcctgagtagctaggactacaggtgtataccaccacacctggctaactttttcattaatttttttgtagagactatgttgcccaggctggtcttgaatttctaggcacaagcaatccttccatctcgatctcccaactagctagactaccagcgagagccaccacacccaactctgctcagttctttttgtttggcagacgaggcttcttgggctagacaaggcttcttgcagtcagacacattgacaaactgtccctcttcacatcaaacccatctctaccacaggtctttgtccaatctggcttcccacctggagtggccaccactcaaacaaatcctactcttttttcctaaggcctgcctctcatctcactttctccactgatgcttcatagtgatctctcccctctcaatgcatttatttattccacaaatactgaagtgattactaaagtctactaaatgtaaggcaccaggcttggtgctcctatgactctataccagttagcaatccaacacagaaataaagcagacaggcaaacaagtccaatatgtctatacttgcttagtgctgggaccttagggttttattacatattgacacagagagttgcatggatgttggttgagcctgttttactagactgcaaacttcctaaggccatgtctcctgtcttttgtatcctccactgtacatacagggttgaagacacaacagacattcatgaaatacttctttacttttattaggatcaaataggaattgctctttttctgatttcaaaagtaattgaggctcagagaagaaactttttagaatatggaaaataaagaaaatattatccagcctgggcaacagagcagggccctgtctcaaaaacacaaaaccaaaaccaaaccaaaccaaaccaaaaccctgtaattccacccccagagaaaactgctgctaatgtgttttatttattctttcaatcttttttctatgcatagacacatatacttctgtatgtttatgatttttgtattgattctgctatcaattattaacatgcttgtcctcctatccagtggttcttaaccttggctgagcaacagacccatttgggaagatttttaaaaatctagcttatgagatacctcagatcaatcaatccctggcagtgggtctgctaaacatcagatacagacaaacaactgcatagatctccaactagattgaagaacaggaccctccagagagcttccaagaagacaccaacctaggcatgggtttatgttcctgacaaagaataaggattgttatgaagaatgttctattttgaattgtgaaaataattatttaaagctgtacaattttttttgtttgtttgttctgagacaaggtatcactctgaagacaaggtcacccaggctgaagtaatatggcatggtctcagctcactgcaacctctgcctcccaggttcaggtgattctcctgcctcagcctcctgagtagttgggactacaggcgtgcaccaccacgcctggcttatttttgtatttttagtagagatgaagttttgccatgttggctaggctggtcttgaactcctgacctcaagtgatctccctgccttggcttcccaaagtgctaggattacatgcgtaagccacagcacctggcctcaagctgtatgattttatatgatatgcacatctcatgtgaaatcagatagtagcctattagtaggagactaggagactagggatttttctgcttcttaggtacatttggaaatacagtttttgcatctccaaatgaagacagacccagatgcattgtagaaatcactctgcttttaggtagttttagacttgaaacaattagtggccctctttactttgctaattatcctaaaatactcaatgaagcctccattcacactgtcccaccatcctcctgcttcccctggcagtgatagaggatttggttatttatagtcatggaataagttgattaggatactgagaacttacattcagaagacatctttcttttctgttcacttaattatagtctggctggtcagcctagtcttaaattgaccatcaatttgatgacataaaacttacattttagataagggtctttgttcttctggaaaaccaggagatttggttcattgttctcttactgttaatagtattaatatgtttcgaggagatatggtttgataagaaatagtcctacggtttaaattatatatatattttttctcttctaaaattatagtgaaagctttcactagaccttgatggcactatggtcattatcttgtcaaaactgtggtggatttgaagagctagtgatgaagaatggaggtttcctgtcctagaaataaccaaaggcccaggcttggaggtggcagaaaaagtggcacttaaggtaacaaatgtttgttgagacctgtactaccatttcacacatagcatctatcacttttaatactcgcctccaaatctgaggaccaaggtggtactctctccatttgacagataagaaaatagattgaaagaagctaagtcacacacccaagttcacgcagcaagaaggcccagatgatttttcttaaactttattcaattctaacacaaccagtaaaatgacagatcaagaaatgaaaaacaggtctgtaatgctttaagcctacgctctttctagaaccactcaatattgtctccagggctgactcaattcctagaaagtgaattgggcttctgaagagactacaagtaaggtttaggggaaataaacatagttgagccatttgggtcctgcacaaagatgcccagctgaggaattgaaggaactgaggaatttaacatccagctactgctctgctttccaagaggcatgctagcaggagatgcatctgtcaagaggaaggaaccctttctttgcaaaaaaagctctgtctgcttgcccaaaggggtgttttcttctgatttcacatgatctgggggtgctttcttctaatgtacacaagatcttagacttccccttgtggagggagtcttagagcgtaaagatggggatttgtggttgatttggaagctttcagaaagctctgtgtattggacaaacagtagtggtctacattggatagccttttacaaccacagggcctcacgtgtatcatgctcctctttcactctcatttacaactccccaaactactcatggtgggctataatcccctttcgttacacattaaaaaaaattaactaaaagctctggccaggctgggagcagtggctcacacacatcccagcaccttgggagggtgaggagggcggatcatttgaggtcaggagtttgagaccagcctggccaacaaggtgaaacctggactctactgaaaatacagaagttagctgagtgtggtggtgcatgcctgtaatcccagctacttgggaggttgaggcaggagaatcgcttgaacctgggaaatgaaggttacagtgacaagatcacactacttcactgcagagtgggtgacagcattctgtgtgtatctagctaaccaaacagctcaaagatgcttggtttcctgcctggaattccagctctattttgacctcagcagagcttagaaatatttctgtgcctcagtcgaagttcactggccatcatcccccataaagagagaactgtcaggccagtggatgaaaacattaattgcaaaaaccacaattacttttgcaccaacctagtaacttgagggttcaaaactgcttacaggcagcctcagttaggggaggttcttcttggatcaatgctatggtaggcaatcctgttaatctgtggccaaaacagtatctccctttcagggagggcactctgaaggccaggaaagggctgtgttggggttggtgtggggaggcactggcaagctaggctgggctggttaagataatgaaattctttgtgaggtcagtcacatctttaggaaataccatcctataatttaataaaatgggcaaagaggtaatttgcaaattggactctgcaaatttctagtatctaattactatttaatcaataacttgtttattgacattcaattttttaaaatgcaagccattgtgtgaaagactttgcttaaaggaaaagcattacagtatgttttgggcactttctagaaaagaaaaaatattaaaaaaagataacatacgccacgttcagcaggaaacctcttccaatcaacagtgatatgaacaaacaaaaccccatcactggacacggcacactgctccctgaacacattcctgtgtccatcctcatgttgatatcagaaattcaatttgaggagcttatgaatgttgatgtaaaatgatgagtactggttattagtgagacacaacagctacttctgaatcgttttcataatcttgaattctcatgtctgaattaccaactgatcaaaccaccaaaccctggcacaaaatggggaaaccaacaaatgcaacttagtatcagaatgcctactttttggaagaaattttaaagcccaatgaaaacccttggccaagcagctggtaaagataaagtaagaactaaggcacagcttttcacaataacagtgatgagaggcttttccttccagacccctgtgctactctggaagtaaatagcccctatctcaatgcctttccatgtaatctagtatctgcttgaaattctcttttttctgctcaacaataccctattccatctttctgccttcacaacccagcttaaaggcatcttttaagagcctttccttcaggctcatggtaaaattactctcttttctcttgaacttttgtaacctctggaacttatcagttgtgaattccttcgacctcttctgttatattgtgaggaccttaatggttgaaactctgtcttaaaatctttgaatctccagcagctggctccacagaaggctcacgatgtttataaaattatagagctaattcttctttgtaagagacacaatcattatgctaaagcaatagaaatgaaacacctaaatgaagggtgaggaatacataagaggctaaatatatgctggatctaataaggttttagactcttccctgcccctaaaaaaaaaaaaaaaaaaaaactagaagaacaaaacctgacccaagcttgtgtgtataaacattagttacaactgaaatatactattgggaactaaaatattcagttttctgttctcagcaccaacatcagtttcttcaattcacatttataaacatatgaatttcaatgaacagatattgttttatttctacatgttcagtgaactagcagattcaaggtgtaagctatttttctaagacaaggattatttattcagtataactgactttcttctattttaggaatttatatacttagatgtagagcactttcataatgtggtgtgatgctccctatatgatggcttcaaaatccttctgagagtgagtttgcatgaattcccccacacccataattagtctctacgagcctggtgctgactcctggtgctgactctgttattaacaaaagttcttagccccagggcactccttggctccactggttctggagggcaggctccagcctcctttcaaacactgcattcatgcataggaaatgctttgactcttctgtacatttccagtgtctctctttacattcttcagcattgtcacctttgctcagcaaaagcctgaactttgcaccctcactggattggtggtaaagctcatactcacacatccaaattacagggtggagagtgcaacagtgagcctcagcaggggaaaaggggctaccagggctgtcagctactggacttcgtgaggacaatgactttatgaaagttgcctcctccctgacagattcagtatcttctccaacaaataagggaagaattacagggattctagttccattacaaaggcaaaatgccaccagcaattaggtgatgtttatggtctaataaagtttactttttcttcattcacccacaaactaatatttttgagcttactatgtgccaggttaatatcttctaagtttatttaatactcagaattcaggattgcccatgtttaagtgttttccagtctgtctcctaaaattctttgtaataacacgtgcaggttgttgcctaatcctttgtgtccgctcagcgtattttccctttgaaaactgctcttttgccagttggaagaactgtcaatcaatcattgggggtcatccagagatgacagccaaaatatttaagaaatacatagtcctcccttatccatagttttgctttccgcagtttcagttacctgtggtcaactgcagcttcaaactattaagtagaaaattccagaaacaattcataagttacagttcaatagtagccatatgctatgtcacaatgctatgtcatagctatgtcattcacttcacttcatctcatgtgggcattttatcacctcatattatcacatgtagaaggatgagtactgtacaataagacattttgagatagaccacgtatgcacaattattacaatatattgctataattattgtatagcattgttaatctcttcctgtgcctaatttattaatttagctttatcacagttacgtacatgtaggagaaaacagtgtatacagggttcaatactatggtggtttcaggtatccactgagggtcttagaacacattccctgtggataagggggggactactgtatagcctagacagcaactagtgagaacagataattgaccaaagctggcctaaacaaactgggtaagtttacctaccctggcaccatctccctggaaggtggggactagctgggagaagcatgtgatcaaacctagccaatcaggacatccatagccaaaggtattggctctgggatggacatgtgactcaaacatcagctcaatcagagttgagaccacacatgtctggttggtgggaagaggctacccataaaaaaaagccatcacagaggaaagcagaatagcccaatacagagagaatgcatattgatgtagttccaagatacaggggtgtctggagttttcagttcatgaaccattctggtcttgctggcttattggcaattacagcttaagagtcctgaccaacacacacacacacacacacacacacacacacaaacacatgcacacacagaaaacaacacgagaaaacttagaaaaccaaaacttaggcactgaactgacacaatctaggagataagggcactggagctggagctggactgagaaacacaatagctaccttcccccaggcattaacttcagagacaggaggacagaatctgcctgggagcaggcagtggggacggcagcatagttgaggagacaaggtacttctaattttccctagtccagagaactagaggccattgcaacagaaaaactgggtaacgtgggtgctgatttttaaggcaaccaagctactgctttacattcacatatttctacattcacataagactgcgatgccttggaaatgagaacaaaagtctagaagagaagggacattggtggcacatttcatcctggaagaaacagtccacccagtaaaacatgaagctctgttggcagggacagatgcagggagaccctgggaacagagcaagcacggcatctgacagctccatgtacattgtgagctcccagagtgtgagagagtcaggaggaggtgtacaagctaccaccatagtaggacagagccacattggaaagaacttattacacagtgcaggtaaggctgggctgaacttactcagcatctgtgggccagagacagcatttgcctggttcctaaatgcatgacaatcagagccacaggaaatgaacatacaccatccaagggcaaacacagttctcaaaaagcttctctattccaagacatgtacagagaacacattaacatggggcctgcggacaaaaatgctacagagactagaaaaaatgtaggcgaatacttttcagacctcaatatggaaaaaaaactttcacactttctaccatttaaagaaatagaagtttgatatgttttatcaagtaaaaattaaatactttctccatcaaaaagtgttctaaagctattacaattatgtaaaaatgtttgccttcacccacaggcctagcaaataatagttgtgttagagcaatttggttatagagttgtgctctctactttcccaaacattcgttaagattatttttaagtaacgttttaaaatatacagaaagaatcgtaagtaaaaaagcctaatgataatagaaaaaatattgcaagatatgtaatcaaagattgtatttaacatataaaaggtatacaaaagtcacccaaaaaagccaccaaaaatgactaatattgaagaaatgtatatgggaaattaaacataagaaaattgtttatcctcatttataattaaagaagtgcaacattatacttaaagaatactgagattatattttcatgtatcaaatcagcgatgataacatccattgcatataaagatcttcagtgaaacacttcataaaagctgatagtaggagtataaactttttagaaagcaatttagcatatgtatcaagtatttttaaaatctcttactttgaatcagtaattttacatctaagaattcagagtaaaaaaagtagtattatttaggatagtgaaaacttaagtatgtatctaagtaaatgtccctatgtctaggggatagtttcattgactatggcatgccaaagacaagactatgcagccagttaaaactataatttttgtttaagtatttcagggtcaaattacatagtgtctagaatttgctttaaaatgctccagaaaaaaggagggggtacagggaattaaaattgtaaaatgaggccaggcatagtgactcacacctgtaatcccagcaccctgggaggcttaggcaggaggtattgcttgagctcaggggtttgagaccagcctggccaacatggtaaaaccccgactccacaaaaaatacaaaaaattagccggtgtggtggtgtgtgcctatggtctcagctactcaggaggctgaggtgggaggatggcttgagcctggggaggcagaggtttcagtgagccaaatacacacacagacacactgctttagtctcatactttcttgcttccagtaagttaaactcagctgagaggtttcccccaccccactactttgtctagcaggaagtgctgtggacatgaggtggggaaagaacactttatggtcaacagaattctgtgattagcagaaaactgggtcagaaaagaaaaggccacctgttcttttcctgcaccagctcacttcattctcttaagtaaatcactttattttccagagccacagtcctctcatctataaagtgaaatgcttggattggacaatctctaagacccctaataatcttgaaattcgatggctcagccattatccatctcattctatacacacagctccctggatgagacacacggaaatagacagtagttgggacaatatttagttttcaaaatgtttttggtataaatgattttagcttgaaactagttttaagttcttcctgctctgatgcttctccaccatgtaaacatataagcctggggtgaatgtaaagggaggtggatgaactcataatcgtgtaaactgtgaacaggattaaacgtgagactgaaatgccccacatttgtaatatgtttgaaccaagctgctggtaagccacaatttctgcacttcatttttcttgacatcagatcataattgctgctcagagttctaagagagatcttaggacaagttcttccaggctcgggtgttgttgctctttgttctatcacaacaacatcctggcaatatatttatttctctctctagaggaatgtttagggaacagacacagtgagtcctctttgaggactggaaaccacttgctacttcagttgttctttttgctagaaatgagttaacaggctctggtgcagctgtaagaaatatacaagacaaaagctgacaccccaagcatctattcagtcttgcaatgagaaacaaggatgacgttatttctaaatacaactatgcaatggcttaagttcttaagaaagggatggaccaaggacacaaatactatcacaatatattgagtgttcccttcaagaaagcagcaggtggctaggcacggtggctcatgcctataatcccagcacttgggggtgctgaggcaggcagatcacctgaggtcaggagttcaagacaagcttggtcaacatggtgaaaccccatctctactaaaaatacaaaaattagccgggcgtgttggcacgcactgtagccccggctactcgggaggctgaggcaggagaatcacttgaatctgggaggcagaggttgtagtgagccgagatagactccatctcaaataaataaataaataaatatatgaataaataaaataaaaaaaagaaagtacctggtgacacaaaaccgtcagctgcaaaatgtttgctttccataaagaccctgcaaaaggccattccctcttgaatggagcagctcatccacagcactgcattttgatagtccccataggaaattctcctcatgccagttggaaaataacattccctatgtgaccatttggagaggaagttccaaccacaggagacagactaaacagaattcctgagagcattcaaatcattctgctagaaacaaagatatcagaccatactttgctagtgctcagctcctgtggggcagcagggcgatgggtttctgctaaaggctgcctcacctgagggtgaattcaggttcacccttccctcaaggaacactgcaggctgcccaggaagttgctgccagcatcatctgttccaaatatttcctcctctgggagcctgctaggctgatgctctgtcctcatttgggtccaaagatcccgtcaggggagcccatatattgttttcctggggttacacaacagcacagacattacctccaaaaggaccctgttattaagcacatatgctccctaggtgcagagaaagggccacatatcaacacatggcataattgtgtttatttggttaattaattgccttctggacagcacagtgggcctggcctgagactaactgagctttaccttttaagactgcagtaaatcctccagacagccatggaagcaggggctgaggcacacggagacttgcaaatgaagagaggtccaatagaacatacaaaggaaccagatttgcccgaggagcttggtaaaaatagaatcctgggccccattctccctttagcaattagaatccctaagacagtcattcttaatcaggggcaattttatcccaaagagacatctgacaatatctggagacttttttatttgaggtggcgtctccctctgtcgcccaggctggagtgcagcggtgcgttctcagctcaccgcaacttttgcctcccaggttcaagcaattctccttcctcagcctcctgagtagctgggactacaggcacatgccatcacacctggctaatttttgtattttttggtagggatgaggtttcactgtgttgatcagactggtctcaaactcctgtcctcgagtgatccgcccgcctcggcctcccaaagtgctgggattacaggcatgaaacactgtacccagcctggagacatttttgattgccacgatttgggagggtgctcctggcatgtagggggtagaggacagggatactgctaaacatcctacaatgcccaggacagcccccacaaccaagaattatctggtccaaaatgtcagtagtgctagggatgactacttgatgtgagaggggtgccaagcatctgtgttgttgacaaactctccaggctattccagtgcacgctaaggtttgagaacttctgcccatgcactggcagccaactgacacatcaaggtgccagggcagtgagggtgggcagaggtagatgagagtggacacaccaaaagcatgagcactgacagtcacagcctactttacgagtgtatccaagtaagacttgtggaagactttcataataggacctatcagaaagggatggttctcaggagaagcctagggcccagttaccccatggagaagggggcagggcaggctgaacaagtgcacctcagaaatatcaacctcattgttaattattccaccattgccttcacggctttgttggtttggctcttaaagggtctctgtgaatcctcttctcaagggcatatgtttctgggtaggggcccatcttcaaccctgaatgtcataaattgatataaggagagcaggaattagtggtggggtgcagtggctcacacctataatcccaacactttggaaggctgaggcaggagggtctcgagcctaggagatccagagcagcctgggcaacatagcaagaccttgtctctaaaaagaaaaaataagaaaaaattagccaagcattgaggacatgcttgtaggcccagctattcagaaggctgaggtgggaggatcacttaaacccaggagtttggggttgcaaagagctatggtcacaccactgtactctagtctgggtaacagagcaacaccctgtctctaaaaaaacataataattctaggccctgtattttggtcacttggcgtaaaacaacctatttgtctttgggggaggatgtaaatattttcacaagaaatatctcaactgtcttctgtactcaagagagtaccaaatcaagagtcaatgatttgtgctctttctcatttctattcagccatatacattgtccagactgctatgtctggggaccttggcatccttgcccatagtaatggttgacctgtcttaacagccttgttgtaaaaatcgttgagtgaggacctgtaaaacaattacaacagaaagaaatgattgctcatgggtacaaagaaaccagtagtgttaacctgttgagatgaaaatgtttttctattaagtcatgaagctgatgggagatgtttgtcattttgcagggaataattatgaatcctccttgctataaggaaagagaggagaaatagcaccaatgttttctctctgcatcataaaggtttagacttttttaaggaacacaaaggatgtaatcaaagtcgtatgagactcaccaatattgctgtttccattacaaactaagtctgtttaattaggttatgtagaccccataaaccatggagaccaggctttgttgttttggatgcttaagccatgactcttttagtcctttttgcaaattttaccgtagtcattatctttctccttgaaatgttattatttccatgacacaaaacatacattttgatgttgtcacaaatgaaatctctcccgtccatcaagaatagcaaactttatttcactctgcttacctgcaagggtacatgacaaatcaatctaacaaaacaaattggctcattatgttgtaatgaagttgaacataaattattttttatggctagattttatcattctattttgttagtgaatactttaaaactctgcattaatgtcctcagaggtaaatgttactatcaattataaaaatcattgcaattcattgatacagatgtgaataagatgtggaaggatgagagccagggaaatgagttgagtttcttggctctatagccagcgccttacatatgccatgtacttcctagtctattccctgcctttatgccatctctctttcacttcctcattcatagtaattcaatagatgaattacttctcattcatctgttggcacagttcatgagcatgtcgggctgggactaactgtatgtctacatttgatatgacccctgataactgttgacaaaagcaccatcacacccattttaccgatggggaagctcaaataccaaaggattggacttagtcaaggtcagtacttccgagaggtattcagggaccacactgatagaagccttgtgggttaattacttgaccctgcccccaagtcctcctacctgtttttaataagcattttacagtaccctgtagctgctttgccattgttttgttcattattccatgtaacaaggttgcctggttttccttacataagcaggaagaactgggtagacactaaaaccatttctacataaacacaatgctctccatctgtgaatacacttcccatattctcaggtcagtctcttagtggaaatcccatgggaaatacctaacaatttcttccagtgcccaaagccacctacctcgcagtgcgaatgaacagattctcactccacatcttcaagaggggacttttacacaaacgccacacacagtcaaagtcgttccctaaggaactcttacaaaaatggtcccagtaaaatatctagaaatgtatctaggaatggtgcctagatcaccagcaactcctgacctaaaaaagtttcctcttcctccccaacctttgtcctagaacacactgtgttctacaaaagcacattacaaaaaaatgattttggcagtcctgatttaccagctctggaccagatctcagggcctctgtgtccctggtttggtgcttccatttccatattgcttcttcataaaaagttttgcaaatactgatgtgacacagcttcctcaaatgaatgctttaaatgcctctaaagagactttgattacactaagaagcagaaaatgttcttgacaaaccactcctttgtttttctataattagttgggttctcttcctcttctcaattctacacctaatgatgcatcttgtgttgttatttaaataacacaaaagacatggtagattgcatttattacactatgatacaaatattttagtatagatgtagaatttctgctccaaccccaggatctttattttctgtttttagcaaaatccaaatatctctgacttggtgttaacagtgatgatttctaattacttaggaaaatctacctttttgtttactgcttttttataacgtgagccactaggcatgccattaggtgaaaagactcacctctaggtttgtttactttgcattttagagtggtagtggggacggtatgagtactgattttcctgtcaaagttaatttgccgtaagacatataataaaagtgcatgtattaataaataaaaaaggcagctaacttgcacgaacatctgacgcttctcatggagtcaaacaccaaacaaattataaaggaagtaaaagcattcctgtaaatgctttcaaatggtaaacaacacccttgaagtcctatgtgtgcaatagccttgggtccaccctttcttaattgacaatgttttgtctgagggtcaagttctagtcttccctctgtctaatctagttcatggatggagaagggaggaaggctgtgggtttcttctaccaacaggtggccagatgcaagttccttggaaaacattgattagctttattccttttatagcaatacacagtgagtagtttcaaaggatcagaaaatggacattttttatgttcctttagtattttctcactctttccatctctccatttacattagtgtgactttgcatcaaacacagggctctcctgccaggcttgtgagactcagcactgccaggagccccacacaggtggatggccccgggcaccttctttgtaccatttccccatctgtcattaggctgtgccccgagttccacaggagcctacccaaaccacaccctgtaatacagtcaaggaagagaatgtctttgtcactgacaacaaaggaacagctttcagtgagcagcactccttcctcatgaaacacactctggtccagccagtttgcttcctttcaggaaacggtgtggggaggtcagtgacctgagtgagttgcatctgtacctctctgaggacagaatatcctaaggctgggggagagagccttggctactgtcaataattgcttctctaattattctgtctcattctgaataccaaagattagggaacataaagtatgtgatgaaatttacatagcaattggtttcaaccaaccattggctagatatgtttcattaaaacaaaacagaacaaaacaaaacaaaacaatcacaaactcactcccaagcacagaatccagaggaaaggaaacacacatggcttgaaggatgggcatgtggattgctcctgtggttgggacaccatggcatccaggttttatctgcacccctttccactggactgcctacagaacagttgggcaagaccctcttctttcaggctaagagccagaatcagcagccatagaaaaataccttctggcagcagagtcttctgctacctagaacagctttccctgtgaagttctgctgtatttggggctcccactaactccaaggaaaattagtggaggaggcaggcatgaggggtggcatgagactaggacccctgcttttttgaatgcatgagggttcatcgttgaaaaaccactccattactcttcaggtacaattaatctgaataagccctacaataggaaaagtcagagtcaatccacttgctctgttagattgcttaaacctagtatcatggcatgcatttggttaaaagctcttccccatgtagcctgagtctcacttgattcatctattattcaaaagctgtgattgaaagagccttcaaactcacaggtgttcaggtcactggggatgctgcacaaagattcgaaatgcagcagccattagtgtccagtctcattattttcaagccaggaaaggctaaacattaacatgctggaacaagagcccttttggggagaaaaaaaataaaaggtaactgaagaccctcaatagcgacaacatgttctgtaacttctggaagtaatcacagggaacaagccaaatggccgattaacagtcatgcacagacagtcttccatggccaagtccaggagatctgacgggttgaaggggatccagaaggaagactaaatcaacttggtccccctgaaagtgaagtcagttccaagggctgaatgtgttttaaaggtttttgttttttcctttaggttaaatttcctggataaaatcagatcagccgtgtaatcaccctgctacaataaaaggagctcagtgtgctttatggcaaccacaccagtcaagggctctctctggcaccaagggagccataagggccccctgccaagtggagctgagggatgctcgaggccagggtctggaccttctcactataaaaagaatagtgaagtatacagatatttacctactgagttatgtttgggctgataaaaatgctcagatgtcctttagtttctctttattgtattagtttaatttttgagacctgtctcactctgtcgcccgccttggagtgcagtggtgcaatctctgctcactgcagcctcaacctcctggggctcaagcaatcctcccacctcagccttcccagtagctgggactacaggcatgtgccaccatgcccagctaatttttttagtttctcctttaaatgactgtttgtgtaagaattgtaggactttgaaaagatttgagctttgaaatttctctagtataatgtgagcacatgattcatatgaatattcagttgcagaaaatgtttttgttctaacttgtttaatgcctgctctgatcttaaaatgatctccttaacatgtatgtatacacaagtctctaaataccaggactgctgttacccaaaacccacactatcaaagatattgctcgcttcatattttcaaagtcagcttttggaggacagggacaatggtttcttgtaatctgctgagggagtcaaccccagtgaggctgttccttctctgtaaccagctgcaattaggatttctactgtccttgcatggggcatccatggcaaaggttgacttggccatgtggttagaactggaaattcagtattttcagtattttcagttgctccagttgtttttgctcgggctactaatcaataccaaatctagtgctatctgaataaaataagatggcatagcaactaccccattcttgctaacaactccaaatgacaacatggtggctcacatctgtaatcccagcactttgagagtctgaggctggcagattgcttgagctcaggagtttgagaccagtctagacaacatggcaaaaccctgtctctaaaaaaaaatacaaaaattagccaggcatgggggcgtgcacctgtagtcccagccactcggggggcttaggagagaggatggcttgagcccgagtggttgaggctgcagtaagtcatgactccgccactgcactccagcctgagtgagagtgagaccctgtccccgcctccccagaaaagatagtgaggctttacttgagtgtgctccaactcaacctcaaggtgccatgccaccttgtaagaaagcttgttaaaaataagtgttattagcctggctgacatggtgaaaccccgtctctactgaaaatacaaaaaattagctgggcatggtggtgggtgcctgtaatcccagctactcgggaggctgagacagaagaattgcttgaacccaggagggggaggttgcagcgagccgagattgcgccactgcactccagcctgggcaacaagcaaagctctgtctcaaaaaacaaaaaacaaaaaacaaaaaaacccccctgttattattataaacagagctacagactgtgtagacatcgacacagtgctgatttaagtatcctcacttattggggtcaaacatttgtctttagtaaaataagggcactgtatttgattctaaaaataaatggcaggagagctgggaatggtggctgacgcctgtaatcccagcactttgggaggctgagacgggcggatcacttgaggtcaggagctcaagactagcctggccaacatggtgaaaccctgtctcttctaaaaatacaaaaattagttgggtatgttggtgcttgcctgtaatcccagctacctgggaggctgaggcaggagaatcccttgaacctgggcggcagagcttgcagtgagccgagaccacgccactgcactccagcctgggtgacagagcgagactctaactcaaaaaaaaaagaaaaaaaaaaaagaaagaaaagaaaagaaagaaagaaatggcaggaatgcgttctgtgatttcaggattctctagtgagtgggtggaggtaacaaccaagttaggataccattagcaactgaatcaacttcagcaaatggctctctaaaactacactgacttggcaagatcatgtcaaaaaaaagaggttgggctgaaaaaaattatttctctaaggaaaagtgtgaacaattagtgccaaactattcacatagtggaaagttccatgcttttggaagatgacacacttggtagtttctaagactgatctaatcagcacatttcatatatattttttttctaaaagagacttagagttcatgattcttttagtgtagattctaaccatttatatcaaatggaaaaagcagggatctattcagttgtgtgtcaaattcttaggatcactgaatagttctgacttgagacaagaacaatataaggccaagaaaacggactgtttcaattaagctcagcagaaaaaaatacacatgagccaaaacagaacgacttaatacttagcaatcacttaaaaatttgtaagctcagtctgagtcattaaaaaaaagtaggccaagaagcttgaaggaacacagatttacaagtaaaagaggcaaacactaaaataaaaatgtttaaaccctgcagtgctaaactactttcagatagctttgtaataagtgaaatttggagaattatataaacccctcacagataagcttggacaaaaaataggtgaaggaatatttggcaaacatgagcatgcataaatcagctgctccagatgacacatggccctggggaatagaatttgactaatatgcttactgaacaatggtgcagtaaaaatgaataattatttctgaaaaattaccttgcactcagggggatgtcagaagactggaacaaggccaacaacatgtgatagtgatgcagagagaaaacagaaggaaagggtagtgaaaaattagtgtatgagatatgcaattgtcagcttgaaaaattgggaataactattaggaaagtaaaattgagtttccagaaaaccagggataaataaacaaaggacagtttgcatttaaatgatcacagacaaattcatgagattatcttaaagattgtaatactgttgttgtaattaagaatacaaagggatggggtagggggtggattgagctgaatgcgcagtgtcttgggattttatattcactgttagtccaaagaaagctgaaaatgatcagaaatcacaaactaagggggcattaagcccagccatgggaaggtgtttcaaagagtgtcctaacaatcaccatcacattgatctgaatcaatactctgactgatgacctaggagcaagtgtcacaaaatttatggatgacactgaggtggggaatgccatagaggacagaggcaagaggagggaaaaaataggttagacatgggtacatctgcaattagagaaaatccatgacaaagacatgaacagactggagtaatttagaaggcaacacaatttcggaatgagaaaattcaacattaatttacactgagtaagaataggggtcaaggtggagaaggccattggcatttgcaattgcatttaaatctgtattcggaacacgtgacccagagtgatgtttaacccggtaagaacccccctctcccatcaggaataaatcagggggaaagcaagtggaagtagagggaactgatggtcatgagcccacccaggtgccagctcctctaacgtggttctcacttgctactcaggaatcctgtgctgtaggaatcattagcacttcataggtgtggatttggagtcagattgtcctgtctgctacttttgtttttaaatagagatgagggtctcactatgttgctcaggcttgtctcaaactcctgagctcaaacaattctcctgcctcagcctcccgaagtgttataattacagaaacgagccaccacgtctgtcctgtgtgctactgttatccgaaggtcagttgccctcatggctggctcccttcctcacttctttctgggttctgctgctttcttggcaaggcctgcttatgtagaacagcatctccttacctgctttatttatttcatgccacttatttccatctgatgtactacatgtgtgcttatttactgccctctcactggaatataagtttactgcagaatccccacagcctagaacatgcctgatatgtcatacacatttgataagtatttgttattaaattatactcttcccaggaatgaatgttttctttatgctacctaagtgtaaactcttaattcatctaccaggaggctacctagcttggaaaagaagaaaaaaaaatcacactatacaaagaaaacgctgaacagagaacttccaagaagtaggaaatatcttgctcaattttttttttcagaacattaatttactttcactggacaaggaaaatctgtttctgtaaaccactatttttattaatagaaattccctgcctttgctaaatggtaaacaaatgttaagaatttgaaggaggatcacatcactgggctcctttgagatccatatgcctcaattcaaccctgtcaaccatgccaagaaagaagagagcagcttatgtccaaagaaactgggaaagaaaaaacaaatctccatgatgctttctttagatgacactaagcaactgaatgggggattaaaaaacaaaaacaaacaaaaaaacaaaacaataaaaacaccaccacagtaaacaaacagaaaaaaccaaacacacattgacctcatctctgggtcttttgtaactgaagaaacaacacctgagttacatggaacaaacactttatcttagtcttcttcaccttcactgtcctatttttgaaccctagacaccacacctgcctagctgtcattgggcttttaaattctctgaaatagactatctaggtgtttgagagcagtacatagaaattagtaagcacctgagaggtgctgatttctctctctctctctcttttttttttgagacagtctcactctgttgcccaggctggagtgcagtggtgccatctcagctcactgcagcctctgccttccaggtcaggcaatattcgtgcctcagcctcctgagtagctgggactacaggcgcatgccaccatgcctggctaattttctgcatttttagtaaagacagggtttcactgtgttggccaggctagtctcaaactactgaactcaggtgatccaccccttcggcctcccaaagtgctgggattacagatgtgagccaccatgtccggcctgagaggtgctgatttcttttgtgatgttaaaggaattagtttcctgatgaggttgagctgctatctgagtagaacccaaggaggccaaaaggtgggtacttcagggaagaccctggagtggtaagacaccagcactgctgcccagtaccatgcgagaatcttttctaaagaaaaaagtgtgcagggggcgaagaaaggaagctggcttgtacagtagcagagatggacacgtaagtagctgacactgatcaataatgcccatgcgccaggcactgtactggggctgcatgtgcatgatatagtctgtcagtcctcacagtagctccatgaggttgatgcaatgacatcataacagagaagttaaggcaattgcccaaagacacacagccagcaattggcagggccaggctctaactctggagtcccgcttgtgatcataatgcactcgaccagcacgtccccagtgacacctcagacctatgtagagtttgcattgcacgaaggtggagggagtggtacccagatgcttttttctattaaaaactgcaccagcatctaagagggaaggattattccagatgagtttgcaataagatccctttgatcctttgtaatctttcatcaattagctcatgcagccaaaaatatttctgactaatcactttaaagaatgactttgagaactcctgtagtctgctctcttatgcctacttcaatgggaaaatagttatacaaactaggaactgccatcttcagcataattttaactggccagagaaactacccaatcattacccagaaaagttgaatctataaagcaattacttttctgtttcagaatccatctcagccccccaacctggccctactgaattataaaggtgtgaaacaacctaacacatccaagcaaatccatctccatgacaacacagtagcgatgcagtcctggaatcaggatgcctgcattccaggctggctggattacctagggaagtttcctcagcctcaataaatcagagttttctcatcagtgagatggggagccattgcatttgctgcaaggttcctaggagatcatttatttctcatcaccattaatttctcatctctgatgtttatagtgcacttaaaatgttccaggcatctaatgcttcctgtgtattgcatttaattcttacccccatgaggtaggtgccatcattaaaacctgatttaaggatgagaggcttgaagcttagctgaagttacacagctagtcagtgatgagccaggatttgtactcagatttgaatgacttcagaggccacatttttttttttttttttttttttgagacagggtcttactctgtcgcccaggctggagtacaatggtgctatctcagctcactacaacctctgcctcgcaggttcaagcaattctcccgcctcaacctcctgagtagctggtagtacagtgcacctcaccatgcccagataatttttgtatttttagtaaagacagggtttcaccatgttggccaggctggtctcaaactcctgacctcaagtgatccacccacctcagcctcccaaagtactgagattacaggcatgagccactgcactgggccagaggccacatttttaatcaatacaagctaaagcttgttaatgtttcatgactgaactctgccctgcctctctgctgccatcctttgtatatgaaactcttagaattagataaaaatccctggaagagcatattcagacataaagccttattgctgtcaaatggacccaggctgcacgtgttcaaaattggtcgaggaaatcccatgttaccattctgagcaggcccaggtggtcagactccatcagaggatgctgcattcatgatgggtgctgtgcagggtcacttgccacactgtgtcacctctatgtcattgctttgcctagagctggtagtttaaaattttaaccactagctccaattttattgcttcctcaggacacatatcataaaacgatgaatgctttactcttatttccaaaaaaatgtcataacttgttcaaggtcacatagcttgttactggcagggctgagtcatttgggtaaattattaggccttagtttcttcatctataaaatagggggattagactaaatcatctccaagctctccttcggctctcaaaaatttatggttctgggccacagacaccaccagccaagcaacaagctggattcagtcttcctcttcaaactggggaaggaggaaaataggaaagaggagctgcagtgtgagggcagcaaggagctaaatagctgaggaatgaaggctggggagggagtcgggggcagagtcaagagactggcagatgtggtaaagaccgagccacttgtggaggcagagctgtgtggaaggcgaggcctcagccactgacaagtagctcaggcctctctccatggaatttcccctaagctagttacccctttctcagctcaagtcagccatttccctgcctcttcagtgagagggaggaagagactgtatggttacagcaactccagtttcttgatctcagtccacctgtgcttactgtggataaagttagttgttaccaaattatatcaaatcgaagactatgtctattgtgaggcgcaccattatttttacagataaccaagaaagatagacactgcaaattatctttgcatggcgttatcaattctaagatggaatctatttacaggagacattaagaagtatgtcttagaattgatgaaatatattctaactccctccattactcatgataaaatccacaagttaagggtttcctatgtaccaggcactatattaaatgctttacataatctcacaacagcctgtgaggtaagtgttattcccatttataggtgagaaaagctcagagaaggtaagtaacctgcccaagtttgcccagctagaggagactatataggaactggggtcagtctgactgcagagcatgtgccttgaatcactaggtcatctcaccttcagcagagagctactggattacagtccttgggatgacaagtggacttgtttctggggtccctgacctctccctcccctactgttctggatagagctgctaacaaaggaagaaagtcgggaagggctcacaggtacattcttggctcatggggcaaccaggaagacagctccagctctgggtatgcaagagttaaacatgggagaagtgggcttagaagggcaccagaattcccagagatggctttacaggaaaatatgagagaataagaagaaggagtcagaaagaaaggaaggtgaatttggtacctcagagctcccatggagggggatgatgactgtaaggctgatgaatatggttcgggggtcctggcatgcatgtgcctttccaagaacctgacagggacctaccagttgtgaattcacaattttaccttcctttttaaaaagaggactcaaattctgaacatttcaagtttcataaacctggatcctccagttccaatcttggtggtaatgaaagcaggtgtggttgggggtggtgggcctcagagaaagctggaagggcgtggggccacatgagcacacagaaggagtgatggttgaaaaaaaaaaaaagtcgggggaaatatgactatgagaaaaggatgtctgcttccttggcctgccaagttttatttggcctgcagaagtagaccatttcctgccccattccttccaagaccaactccacagactggcagtgagcaattttcctccatttactttgaagaagttgttttaccaatgagccctgaaagtgggcagattgtcatagaactcttaggtatattttttctattctttaacaatgtttttgtgcctgttttatcatggatgtattaatgtagtagtatatgtatataattttatatagataactatacataagacaagcaatggagaaatttattgattgatataggtctgtgatcaagaagttgcaagattattgccctgtggagatatttctccagtctcttaaagttctcccattagaatacttatacactgttggcaggagtgtaaattaaatcaaccattctggaaagcagtatggcaattcctcaaagagctaaaagaagaactaccatcccacccagcaatcccattactgggtataaacccagaggaatataattcattctactataaagacatatgcacgcaaatgttctttgcagcagtattcacaatagcaaagatatggaatcaaactaaatgcccatcaatgacagtctgggtaatgaaaatgtggtatagatataccatggaatactatgcagccataaaaaagaacaagatcatgtctttcacaggaacatggacggagctggaggctactatccttagcaaactaatgcaggaacagaaaaccaaatgctgcatatctaagtgggagctgaatggtaagaacttctgaacacacagaaggaaatgaccgacactggggtctacttgaaggtggagggtaggaggagggagaggaacagaaaggataactattgggtactgggtttaatacctatgtgatgaaataatatgtgcaaacccccatgacatgtatttacctatgtaacaaaccttgacatgtaccccccaaatctaaaataaaagtaaaaaaaataagttctccccttaaagcttctgggcaacaaggtcataaaagacactcatcttgggtaaaattgtagttacattcatagacttcaatgctcaatgttttggacctttgctttcttacatttctttcaacttggacagtaaattaaaaccattgttctatttttctctttttcagttactagcccagtatttggaatttgccaaagctatattcctcagaatttacttcaagagctcctttgtatcggcggagaatgaagaacggagaagaggaggaggaggttgaaagaaacttaagagatgtggcaactaattgcaacgtgtagattgtatttagctcatgattcacacaaactagatatttgttattaaagaattatggttgtttttggtgtgatattagtattgtgctcacatttcttaagaatctatctttagagataggtgctgaaattcttgcagatgaaatgacattatcatctgagatgtgcttcaaaaacagttaaaggagatatcgataagatggccttgaattcacaattgctgaagatgggtataggccacatggagttttattataatcttttctctccttttatattgtttgtagttttccattataagttaaaatgaagaaaataagtcaaccaacatgaagcggtcagtgagattcttacggacatcccagctttgcctcttatccgcctgacatagtcatggaactagaaagacaagcacaatttgccaagcatcagagtggcatcttgaaactgctgggttttgtttagggtggcctccctaggaggagaacactttggaccagggagtgaacagcttggaactggagtggctttactgctggcaaaaaagaatttgctaattctcaaaggggggaaaaaataaaatcatgaaacaggatcacaatgctctttggacatcaaagaatcattacaaaacaagattttggtgagttcaatgtaaatgaatgagggccatgcggcttcaatttccttcaaaatacacaagtttaaaaattcaaggaaaaatgccctgttaaacatgtgctgaactgaaatgcttcgagagtcattgagcccaaatgggccctggctttgccccaagactggatcttgttcctgttggaatatgatttctccaacataccccatttcctctgtaaactctacctccttccttccaggtcctcgtccaaattctacttcagatgctcaaaacacaggacaagacaaatccagggatcagcaacacttttttttccccttttcaattttgataagaaagaaacaaattcttggagactcaatttggaaaacatttgctggcaaatccataaagctcaccctgttggtttgaactttgaaagtgttgggaatggctaacacagtgaaaatgaagtggggaggaaatggatgctaaggcaatccactgtattccactcactcccgactcattcaccccagaaaaaatccaaccataatcatctggaccttcctgtgtggatctccattagtataaagcttttttaaaaaggcacttccccaggtcctggagttcatggcccaatacctggcccaggtctgactgaagttagtaggcaggaaaaggagctactaagggtggtcttgccacacagccttcacctagagaaggggatactgaaaagccagaccagggcgtaatggatagatggaaatagatacagaaaatggaggcaagcaacctccccacttgaaagcctggaacgcccagctgggtttgatttaaagctctctttgggcctgtgagccccaaaatgaatgttcttgttgcatgaagtctgtgcagtttgtcagaggtgtatgtcgcaggttaggttagagtcagttaacctaggaggcggttggtggttggaatccttggttctaagagcttggtgtgttctgtggctctgactcctggggcctaccacattttgcaggaagggcatacataaggctgcccataactcttaccgcttttggcagtttctccccgaggcctcatccttctgttacagtaggtagttagacagacatgaggcagggaaggccaccctccccacaatgaggaatgtcaggcaaccatcaggtgatggtcaggcagttgttaattgtctctctaaaataatcattggttgaagccagggccaggcagtttcccaataaatagaaaacacctgaaactggtgatcagcttcctagtaagatctcaggagttgggtgagtggactcaagcatgcgcactaagaggcaaaatggcagagtttaactggtatatgaatcctcaactgataaggagaaaaagccctcaagtgagcacgtacacaacttcagtaaacacactgcgcacgctcaccccccaagtgcctgaatgccactgtggatgcggacagcccactccaagggaagaatcaggggagaagagatgcaacccccctggaagcatgccaacatatgaaacaccaagtcaaaggtcaaaccacccggctgatctcaagtcacccgcttggccctcttctaagtgtacttccttttgttcctgctctaaagctttttaatacacttttcactcctgctcaaaaacttgccttggcctctcaccctgccttatgacccttggttaaaaattctttcttttgaggtgttaagaattgaggttgctacagatttgccaccagtaacacttccatagccttagatgatttaggtttcaaaattggaattgctcattttaatctctggagtacaaaactccagtgggaataagctatccccacttagtactactatctctatagggataagaaaataaagtataattttctctccagattctataatgaatattgttcctagtgattccacttacaaaccaaaaatatttgactctaagctggaaagagcgcatcatttcctggcttcctgggaagtcagtcacgcagctagtggcaccagtttccaggacttgtcgtcctccagtgaccccgcctagctgtcttgttgataactgtcttcctaaaatgaagggcaggtactttgaaaagcgagtcccaaactaactgtgcatccactcaaagctcactcagactttgtaccacaggcaagagcaggtcacaccatcagaatatggcacaaacgtgagaataattttcaaggatgataggaactaaaagtttttaaagtgggaaggagatgaaaaaactccacttttctgtaactagctcatgagggtttggtgtgtggagaacgaaatgcaccaccagtactagcaccactccaccaaattctaagtttttttcttggatttttgttaaacttaaatatttaggctaggcgcagtggctcacgcctgtaattccagcactttgggaggctgaggtgggtggatcacctgagatcaggagttcgagaccagcctgaccaatatggtgaaaccccatctctactaaaaatacaaaaattagccagacgtagtggcaggtgcctgtagtcccagctactcgggaggctgagacaggagaattgcttgaacccgggagatggaggttgcagtgagccaagatgatgccactgtattccagcctgggcaacagagcaagactccatctcaaaaaaaaaaaaaaaaagacttaaatatttaaaggaatgttacaaaagccacaggagatgactgaccagcacaatgacaatcccagttattcaagtacagtgctgcatcctgaaacatctgagatgagcctagcttgtatcattatgagcaaggtcaatattcccttccgtagaaaccaaccagggtcttctttatcacagcttgcaacatttaggagttggccaagatatgaggcaaattcattcaatttggtttaacttaattctgccctgacctgtgcagaagctggccatatgaacattactacaacccgagatctcagaactcacagggtagaagttcctgatgcatatagcactgagtggggacacagagaggagtgataattttcaacagggaaagtcagggtaagttggctttccagctggagtgaagagttcttaaactgtagtgcccatacggatcccctggggagtttgtcaagaatgaaaatggggtggcctcatgagaatcacctggaagacttaagcatgaaaatggatgggccccctctcccaaagattttcattttagtaggtttgatttagagccctccaaatctgcattttgaaaacaaactccacccctacttctgatatgggtggtcctcagaacctacactgttctaaggttttcatctacaagtctctccacatgcagggctgtaaatatagggccagaaagatgagaaggctgtttccatgctcatgcccatgatgctgaaagttattttcccagattccctttggggtctaggaaattcaaaaagaatgttcatggaggtctgcggatgagggcatgtggggaaagaaagcactgtcactcattcttagggcatgctctttgtagacctcagggctgtcctagattccccatgccctgatctatggattgggactccacaccaaatactctggttttagggttattctgtcggattcactgtcctctaggtcaaggcatcaggtgacaataaacatatttaaagaaggaaaggccctggtataaacacacctgatagcaataacttaagcataccctgagactgaccctgtatagcagacacacctgcatgtggttcggagttccaagctaaggaatccgggagtagccaacccggagggtcattccttatctatgagaaacagcttagcccctagcctgtcccaggaaacgtgggctgtataggagacggatgacgtcctttcttttgggtgaatgttgctaggtggagactgttagggagagggtcctaagcaaatataaaatgcatgccttttgcaagcatttgcagttctgtccagctctcgccattggactatatgcaaggggtttctcctgtccagcccgctgccactggactctctcccctatatgtaagtccccagtaaaacccagtgtctcatttgccagttctgggtctgctcttcatccttttgaacctggtgtctttcccactggagtcaataggtgtttggcccaacattacgaattggtttggccaagtcgttataaactattggccctcaaggccaaaccaggcatgcctaagtgatctgctaaattggacacagggttgttgttttgttttaaattgaatttgaatgctttcaggcattatatattcattctgcagttggccagaggcctcaccatctccctttgtgttatgcccgaatgatacatgttttaaaataattcctggctgggcacagtggctcacgcctgtaatcccagcactttgggaggccaaggtgggtggatcacaaggtcaggagttcaagaccagcctggccaatatggtgaaaccccttctctactaaaaatacaaaaattagctgggtgtggtggtgggtgtctgtaatcccagctacttgggaggctgaggcaggagaatcacttaaacccgggaggcggaggttgcagctagctgagattgtaccattgcactccagcctaggcaacagagcgagactctgtctcaaaaaaaaaaaaaaaatcctgccttgcccctgcaggcatttgactttgagaaacctgggccacatgccaaatttgaatccatgtactggattagttccagcgtctgagctgggcatgaactcaggaacacaagagtgcattgctgttagagagaaaggaaaatccaggagggtctgtgcatctggaaaaacaaggaatacagggcaagcttcccccagtgtcaggaatccaaagctcggataaagggtggaggaagcccagcagatcccccaagctctgcctgcttttgggatcctatggcccagagtagggaagagaaggcctccatctcggacatgcaggcatcacccatcattcctgctcccaagcgtgctaaactggcccagcagccctatttactgttccaaatgatagtttttcaagctttggtgacaaccacagccagcccctaacctttccgctggtgccacttaccatccctgaaatacttcctctttctacccgtttctgcctcattcctctaagcacttcaagatccagcttaaacccccaactcctctggaagccttccctgatcaatttcaccaacatggacaatctctacctcctctcaacttactacctactctacttataaatgacttatttccatctgccttgaatcattgcttatatctcttatgtgtataaatttcagcttctcaattagactgtcaactcctagaaaggaggtaccatgcctcaattcttattgcctggattccttagagaacatgacagtacctgaaatgtgtcactaattcactgattaattatccccagtagcatcggggaacagctgcacagaattctctcacaaagcatacacagcaattggaagcttctaagaaagtcagataaatgtggaaacaccatcctggtaatggtgattcctggcaaagtatgattccctagcatcatacttttatagattgcttgtgtccgttcagttattcagcaaaaatgttgcctttgatttatgtacttgtagaagagaaaatttttaagtggtataaggaccttccttcaattaggctataaaactgaaagtaaacaaatggaaagattcctcaatagcaggaatctttgtgtaggaatagcaggaatctgtagtcagtggagtggtggcccccaaaagatgtctacccagaacctgtgaatgtgaccatatttggaacaagggtcttgtagatgcaattaaggatctcaagataagattaccatggagtatccaagtaggccctaaatccagtgataagtttccttataagaagaggagaaggcaaagagaattgaagaggacactgaggagaaggacatgtacagacaggtggaggcagaggtagagttatgcagccacaagccaaggaacacctgcagcacccccctccacaaaactagaagaatgcaagaaagcattctcccctatagccttcatagggagcatgaccttgctgacaccttgattccaagcttctggatgccagaactgtgggagaatacatttctgttgttttaagacatccaacttgggttaattcgtgacagcagccctaggaaaccaacatagcaacgaagaaggatagcgcatgggaatgggtgggcagggaagaatatcatggcactggatttcaaagatcccaacctcagcatccattgagagaggaatgagccttttcataatctctgccattgtctgtttgtctagaaaagcttctgcaaggtcattatttcctcagagatgctcatgattcagatttaagctagacactttctcttggatcctggagttatattccaataagatgggaccagataatcctgaaatgcagaacaaatgatcacttccaagaacctagctgtatttaccaaagagcatctgctgtgttagacaaattggctggtccagctaattacaaaggaggcacgggctaccactacatagtcatgggtggtagcactatctaatgtgaccagacaagcttttctgatctgaactctatgaactctatttaaagtctctgttttcatttgcccactgactgtaatttacacataagccaactcttgctatttttcccgtctggttaggttcataaggaggaatacatttttgcaaatgttccaaacacaaggcacacacagcaacacttttcatatgattgctagaagtcattcacattagtctataatccttattgaaagcttactaacaaaaggagctggaaaaatatcactagaggttggtgacatgaggcatttccttgcataaaatggacatgtgtcatgtaggaaattgtctttatttttcagagatgcacaatgatgtatttaggggtgatatgtcatgatggctacaatttgctccagaccattgcagcaagaaatatatgaagcaaatgtggcaaaatgttaacccattaaatcaaggcaatggaaatatgggtgctcaaggcatgtttcttcgtatcccataggtttcaaaagcatcaaaaataaaaataacatggatatatacattttatacatagggttctttttttactgatactatacctgttttcaggtatagagactgtctcaataaagggacgatgcctgcttgcaattataaatacccaatagaggcagcagatctatgcatacaaattctattcttaactgctcttcagttctatttacggaaggaagagaagttacatctattgaggaaaaagagtaccccaaaaaagcagcactgacactgaagcaggaaaaaaaaatgccttattgagaaagtactgcatctgttaatatggggcttttttgttaagtcacagacagctaagcatgccgttttaaactgctggcagggtgctttgtccaagtgcatctagtatgtgtggaatttaaaatggatatatcagctagggaatggactcgggtcccacccccaacatactaggcacataaacacacaggcacggacagagaggggactcacagttctgaatacaggaagtgcaggttgcccacattgtcaatgtagttagcaggactgagccaaggcaagaccagcaacagaagcgccttcattctccgagcagtgtgctgccttctccctggccaccttctgtcagctacaagggcccaaaccagccaagctcctttaagcaaaccttgccatgcccccacaatcagtagatcacaaagaatttgactgagaaccttcagattaagccacgttaataaatcacgggcccgtaagaagattatgctctctgattctcagatgagaggatgtaggaacgcaaggagccaccacggttggcgagagagcttaggctgagagcaggcaagctgatgcccaggaaaggaaccagcccctcctgcaggatgcggactggttcttgggaagcagctggtacatttacatcaccggctgggagcagacaggctgggagttaaaatgtgttggaagaggacatgagcatgacacattcagaccccacggtgtgaataattaaataatgaaaagctgccctccagtttgctatagcgacactgtaagaaattcccatctttggagcagcctggagagctgagcttaaagcaagcattcacatattcagtggctgaaatatgaaccaaccccaccttcctccagcacccatcactgtcttgactgcactgacatatgaaagagatgtgacagtgacagcttcctcgctaattttgaaatctggctctcgagaagaataggctgtgccattctctgtcagaataacaaagagcctggatagacataaagttctgtccaaacaatgtacaggttcctgtttggtgaggaaatgagtcactccattcttccttctccctggggggaatgaattgagctctgaaatcagctgtatgacacttgtttcatttaagctctcaagcctcagtcaccttacctttgaaatggagctaattatgccttacctacctggtctgtcagggactgggccacatcccctcttccagctttaagatctgggatttgagactgcatcaccggcctcaacactaagacttctttgcaggcctaagctctggaatgccacagaagcccccaggactctcgcttaccccatattcaagaagattaaattccattttgccaactcaagaccagaatcttaatagaaatggctcgaagggataattacattcatcacattaatgacagccaagccatgatagcaaactccactccacaggaagtagaccagagaaaagtctacaggatgagacgagttgcaatgaactgcgtagtcattaggaatttggcatcagaggcagggctaaagagtttaaatacagaagactcttagaatgtgcagatttaatttctacagtttaaagtgcagatgaacaaccttgataaaacatgggatataataattcatgattttgttgaggtccaaattggaattctattctctgtaaggctgctctgcaagagtgagtcagagctcatggaaagcagtagaaagaagttaggtttgatatgtaggtgctggggttagagaagcttgaggttagagttctagctctgctgcatactagctgtatgacagtaggcatgtttggttaacctctctgaactttcatgtcctcccctgtaaaagaaagacaatagtaatagtgcttaactcagagtgctagtaagaaggtgaaatgaggcaatgcccataaacaacaaagggcttaacgagtattagcttaatgttattgtattttatttttttcagagatgggggtcttgctctgtcacccaggctgtagtgctgtgtcacaattatacctcactgcagtggtgaactcctgggctcaagcaatcctcctgcctcagcctcccaagtagctgggactacaggtgcgtgccgccatgcctggctaaaaaaaaaaaaaaaaattaaaatctttttcagagatgagggtccctctatgttgcccaggctggtcttgaacttttggcctcaagcaatattcctgcctcaaccttcaagtagctaggattacaggtgcaagccactgcacctgggtctactgttactaataactattagcgatagtgaatgagcctacttggaagcttaacagctatctccaagaggttttgttattcttttcttatcccttctttcctcctatactattagagaagtgacatgttatagtcttatcctaaatatggagtttcacaaagtcctgaaacatgctcttcttggatgtccacgacctcctatatagatcagaactcttaagtagcatgatgtattataaaggttgtggacttcatattggtattggattgtatttctgacgatcttggacatgtcagattgcttctgacatttgatacatcttttattaaaaaaggatgactgcccattcaccaccttgcatttaaaggggatgaaattaattaattaatgtgactgcaatataaacatgaatgtaaggttttctgttgttttttatgttgctattgcaaccactgctggttgcctatcaaatatttaacctccccttcttccttataacagaacccaggttttatttatgctgttactacatgtagaccctctcacagatgggcatctgtataacacaatagtgactaatgaggtatgagtagaaattactgggtaaggcatctcagaaggctctttaaaggaaggtgtctccattggcacattgtatttttccctgcctgcctaattctttctgcctggaacttgtacataacactgaagcatgcagccatttgagaccatgaggtgacaaacttgaggatgaaaactgaaccgattcctgctggcatcatgtcatggcaaaatcatagtaatcctgggcttcctacccttagactttgtattacatgagaaaaacaaaacttctacctggttaaaccaatataacacaattttccattacctgccatctgatgtaatcctaattaatacaatcccttggggctaaaacccaacctcaaatgaacagagattgctccatggcttccttgccggtaaacagccctaactctaatctttgccctattctttgcctggctgtcctgtttatccttaaatgttatctcagatatcactgattatctcctattttcttgcttcttttcttttcactaaacaaggtttatttaggggccaggaaaatgttgggttcagagttagaaggtcacagtaaggatgtatgtcaaagcacaattattatgagatgcttagtctggctaaaatgaccagcaagactaatacatgcttacttttcataggtaatagtcccctgtatttcttttcttttctttttttgagatggagtctcattctgtcaccagactggagtgcaatggggcgatcttgactcattgcaacctccgcctcccaggttcaaacgattctcctgcctcagcctcccgagtagctgggactacaggcatgcaccaccacacccagctaatttttctatttttagtagagatggggtttcactgtgttggccatgatggtcttgatctcctgatctcatgatccgcccacgtcatcctcccaaagtgctgggattacaagcttgagccactgtgcctggccctccgtgtattttttctttcaataaagtcttccccactttgtagacagctagctgtgttgtcctgaacacactaccctggatggaagtaaaggtcaacagacgatccaggttagacctttggagaagaaactcccaggacactggatgcaaagttaatccggaaaatattcccagccagccttcagccacgtatgtcttgggccaattacatcacgttttcattcacagctcatttcaaattattgaacaatgaactctgtattcatactagtaaatacttgaggagggtcagttttattatcttccatttttagaaaataagagagtaggtgcagcaaaccatcatgacacacatacacctatgtaacaaacctgaacgttctgtacgtgtatcccagaattaaaaaaaaggaaaaaggagagaaagtaaagggcaaagtgagttgtcctatgaaacaattcacgtatgttttcaacttctctcttttacctttaaaaggtcatttccttagaggcagaaatcacaacttatttttctttcattcagggcctgacctattgtgaatccttgctaaatactgtgtatgcagatgatgagattacaaaatggaaatgtggtcttgagcctaaaataagtctcgctcaggatcaagaagtaaaagcttggcttccacacaccttctcattgaaagtctgggtcaagagagatgagcagatgggccctctccaggggccccactacacactggtaatggcctccagttaggaaggctgccattcaactcaataagtccatcaccaccctgggaattctctacagtagacccatgtgatgggagtctgtaagcatctaagagggcagaaatcaacagaattagccagaagtttccaactgctagctccaaactcagacttattcccataaaagagctctctagtctgaagacaatcaatgatctagccagtcatgcatacctacagccagtcctaaatgttttgctcaagtatttatatttagtagacaagtattgtttacaaatgaaacgcattctggagaaaacaggcaccagctgtttaaagatgtgattctgtctgcctgtaccctgacttaagtctcctgttgggcaacaggtgcagaaatttcagttagacaggaggcataaattcaggagattatttgtacaacgaggtgattatagttaataacaatgtattgtgcagtagaaaattactaagtgagtacattttaagtgttttcatcacaaaaatggtacatatatgaggtaatgcatgttgattggcttgctttagccatttcacaatatatacatattttaaaacatcatattgtacaccatacacatatacaatatgtatttgtcaattaaaaaaataaaatttgggcctggcacaatggctcaagcccgtaatcccagaactttgggaggccgagacggatcacgaggtcaggagatcgagaccattctggctaacatggtaaaaacctgtctctacttaaaatacaaaaaattagccgggcatggtggtgggcacctgtattcccagctactcgggaggctgaggcaggagaatggcatgaatcccggaggcagagcttgcagtgagctgagatcgtgccagcctgggcgacagagtgagattccaactcaaaataaataaataagtaaataaaatttaaaacaattttatttagatgcatatttattgagtaaagtgatgttaaagatcaagcaaaccaatgcaaaatttataaacaaaagctatgacaagactcccatacaagcagccaccagcctggaggcctcacagagaaaagtaaacacttgcctgttagttttctaaattcaagggtctccagaggtattaactacttcttaagtattcttcttaatatccctcctaaggggagtaagaggggggcctactggcccatcacagacccaaaggccaagagagatccacagtctggttctaggttagcttcaaattctttttttttttttttgagacagagtctcgctctgtcacccaggctggagtacagtggtgtgatctcagctcactgcaacctctgcctcccaggttcaagcgattctcctgcctcagcctcccgagtagctgggattacaggcatctgtcaccacgcctggttaatttttgaatttttggtagagacggggtttcaccattttggtcaggctggtcttgaactcctgacctcgtgatccacccgcctcggcctcccaaagtgctgggattacaggcatgggccactgcacctggccaggttaacttcaaattcttaatccttgccaataaaatgtcaagggggtgggaggcgaaggaatgtatatcaggcatatggtgactaatacatacaacatatttgtggaaatgttggtttcaacctacttaggaagcagaagtgtggaggcttgagagcatgtgttgaggcccacgcctccctgatgtgggggcatcctctccagagagctgctgtgggcgcctgtgaaggactcactcacagggtgcagcttaaaaaggtgactcactttcagtcagttttggtttctctcctcactgctgttttccaaaagtgcatctcattatgagctgagtgttcatcaagcctctatctcaggcttccttgaggtgtgtgggggtcacacgggctgcatgggctaagggtgaatgaaattcccagtctgcttcaggcagctgaggggcacctgtgtcatctttctcctgaagacctcacagagttccaacagccacctgctagcccttccccttccccacatcccttctggcttcaccctcagatccacacaccatcttctccctatttttagaaaaactctcagaccccaaacagtcctggatgaggggatgaggaggagtggctgggttttcactttctccccagaggatgactccagtgctgtcttctgtctccccactcttactcctggggtgggcagaataattattccccagagatgtccagctcctaatcctcagaacctctgagtatgtcacttcatatggcaaaagggactttgcagatgtaattaagaatcttttggggaggagccaagatggccgaataggaacagctctggtctacagctcccagcctgagcgacacagaagacgggtgatttctgcatttccatctgaggtaccgggttcatctcactagggagtgccagacagtgggcgcaggtcagtgggtgcgcgcaccctgcgccagccgaagcagggcgaggcattgcctcacttgggaagcgcaaggagtcagggagttagttccctttcctaatcaaagaaaggggtgacagacagcaccgggaaaatcaggtcactcccacccgaatactgcgcttttccgacgggcttaaaaaatggcgcaccacgagattatatcccccacctggctcggagggtcctaccccacggagtctcgctgattgctagcacagcagtctgagatcaaactgcaaggtggcagcgaggctgggggaggggcgcctaccattgcccaggcttgattaggtaaacaaagcatcctggaagctcgaactgggtggagcccaccacagctcagggaggcctgcctgcctctgtaggctccacctctgggggcagggcacagacaaacaaaaagacagcagtaacctctgcagacttaagtgtccctgtctgacagctttgaagagagcagtggttctcccagtacgcagctggagatctgagaatgggcagactccctcctcaagtgggtccctgacccctgacccccgagcagcctaactgggaggcaccctccagcaggggcacactgacacctcacactgcagggtactccaacagacctgcagctgagggtcctgtctgttagaaggaaaactaacaaacagaaaggacatccacaccaaaaacccatctgtacatcaccatcatcaaagaccaaaagtagataaaaccacaaagatggggaaaaaacagaacagaaaaactggaaactctaaaaatcagagcgcctctcctcctccaaaggaacgcagctcctcaccagcaacagaacaaagctggacagagaatgactttgacgagctgagagaagaaggcttcagacgatcaaattactctgagctacgggaggacattcaaaccaaaggcaaagaagttgaaaactttgaaaaaaatttagaagaatgtataactagaataaccaatacagagaagtgcttaaaggagctgatggagctgaaaaccaaggctcgagaactacgtgaagaatgcagaagcctcaggagccgacgtgatcaactggaagaaagggtatcagcaatggaagatgaaatgaatgaaatgaagcgagaaggaaagtttagagaaaaaagaataaaaagaaacgagcaaagcctccaagaaatatgggactatgtgaagagaccaaatctacgtctgattggtgtacctgaaagtgatggggagaatggaaccaagttggaaaacactctgcaggatattatccaggagaacttccccaatctagcaaggcaggccaacgttcagattcaggaaatacagagaacggcacaaagatactcctggagaagagcaactccaagacacataattgtcagattcaccaaagttgaaatgaaggaaaaaatgttaagggcagccagagagaaaggtcgggttaccctcaaagggaagcccatcagactaacagcggatctctctgcagaaaccctacaagccagaagagagtgggggccaatattcaacattcttaaagaaaagaattttcaatccagaatttcatatccagccaaactaagcttcagaagtgaaggagaaagaaaatactttacagacaagcaaatgctgagagattttgtcaccaccaggcctgccctaaaagagctcctgaaggaagcgctaaacatggaaaggaacaaccggtaccagccgctgcaaaatcatgccaaaatgtaaagaccatcgagactaggaagaaactgcatcaactaacgagcaaaataaccagctaacatcataatgacaggatcaaattcacacataacactattaactttacatgtaaatggactaaatgctccaactaaaagacacagactggcaaattggataaagagtcaagacccatcagtgtgctgtattcaggaaacccatctcatgtgcagagacacacataggctcaaaataaaaggatggaggaagatctaccaagcaaatggaaaacaaaaaaaggcaggggttgcaatcctagtctctgataaaacagactttaaaccaacaaagatcaaaagagacaaggccattacataatggtaaagggatcatttcaacaagaagagctaactatcctaaatatatatgcatccaatacaggagcacccagattcataaagcaagtcctgagtgacctgcaaagagacttagactcccacacattaataatgggagactttaacaccccactgtcaacattagacagatcaacgagacagaaagtcaacaaggatacccaggaattgaactcagctctgcaccaagcggacctaatagacatctacagaactctccaccccaaatcaacagaatatacatttttttcagcaccacaccacacctattccaaaattgaccacatagttggaagtaaagctctcctcagcaaatgtaaaagaacagaaattataacaaactatctctcagaccacagtgcaatcaaactagaactcaggattaagaatctcactcaaaaccactcaactacatggaaactgaacaacctgctcctgaatgactactgggtacataacgaaatgaaggcagaaataaagatgttctttgaaaccaatgagaacaaagacacaacataccagaatctctgggacgcatgcaaagcagtgtgtagagggaaatttatagcactaagtgcccacaagagaaagcaggaaagatctaaaattgacaccctaacatcacaattaaaagaactagaaaagcaagagcaaacacattccaaagctagcagaaggcaagaaataactaaaatcagagcagaactgaaggaaatagagacacaaaaaacccttcaaaaaattgatgaatccaggagctggtttattgaaaggatcaacaaaattgatagactgctaacaagactaataaagaaaaaaagagagaagaatcaaatagatgcaataaaaaatgataaaggggatatcaccaccgatcccacagaaatacaaactaccatcagagaatactacaaacacctctatgcaaataaactagaaaatctagaagaaatggataaattccttgacacatacactctcccaagactaaaccaggaagaagttgaatctctgaatagaccaataacaggatctgaaattgtggcaataatcagtagcttaccaaccaaaaggagtccaggaccagatggattcacagccgaattctaccagaggtacaaggaggaactggtaccattccttctgaaactattccaattgatagaaaaagagggaatcctccctaactcattttatgaggccagcttcattctgataccaaagccgggcagagacacaaccaaaaaagagaattttagaccaatatccttgatgaacattgatgcaaaaatcctcaataaaatactggcaaaccaaatccagcagcacatcaaaaagcttatccaccatgatcaagtgggcttcatccctgggatgcaaggctggttcaatatacgcaaatcaataaatgtaatccagcatataaacagagccaaagacaaaaaccacatgattatctcaatagatgcagaaaaggcctttgataaaattcaacaacctttcatgctaaaaactctcaataaattaggtattgatgggacatatttcaaaataataagagctatctatgacaaacctacagccaatatcatactgaatgggcaaaaactggaagcattccctttgaaaacgggcacaagacaggggggcacaagacagggatgccctctctcaccactcctattcaacatagtgttggaagttctggccagggcaattaggcaggagaaggaaataaagggtattcaattaggaaaaaaggaagtcaaattgtccctgtttgcagatgacatgattgtatatctagaaaaccccattgtctcagcccaaaatctccttaagctgataagcgacttcagcaaagtctcaggacacaaaatcaatgtgcaaaaatcacaagcattcttatacaccaataacagacaaacagagagccaaatcatgagtgaactcccattcacaattgcttcaaagagaataaaatacctaggaatccatcttacaagggatgtgaaggacctcttcaaggagaactacaaaccactgctcaaggaaataaaagaggatacaaacaaatggaagaacattccatgctcatgggtaggaagaatcaatatcgtgaaaatggccatactgcccaaggtaatttacagattcagtgccatccccatcaagctaccaatgcctttcttcacagaattggaaaaaactactttaaagttcatatggaaccaaaaaagagcccccattgccaagtcaatcctaagccaaaggaacaaagctggaggcatcacactacctgacttcaaactatactacaaggctacagtaaccaaaacagcatggtactggtaccaaaacagagatatagatcaatggaacagaacagagccctcagaaataacgccgcatatctacaactatctgatctttgacaaacctgagaaaaacaagcaatggggaaaggattccctatttaataaatggtgctgggaaaactggctagccatatgtagaaagctgaaactggatcccttccttacaccttatacaaaaatcaattcaagatggattaaagacttaaacgttagacctaaaaccataaaaaccctagaagaaaacctaggcattaccattcaggacataggcatgggcaaggacttcatgtttaaaacaccaaaagcaatggcaacaaaagacaaaattgagaaatgggatctaattaaactaaagagcttctgcacagcaaaagaaactaccatcagagtgaacaggcaacctacaaaatgggagaaaatttttgcaacctactcatctgacaaagggctaatatccagaatctacaatgaactcaaacaaatttacaagaaaaaaacaaacaaccccatcaaaaagtgggcgaaggacatgaacagacacttctcaaaagaagacatttatgcagccaaaaaacacatgaaaaaatgctcaccatcactggccatcagagaaatgcaaatcaaaaccacaatgagatactatctcacaccagttagaatggcgatcattgaaaagtcaggaaagaacaggtggtggagaggatgtggagaaatacgaacacttttacactgttggtgggactgtaaactagttcaaccattgtggaagtcagtgtggcgattcctcagggatctagaactagaaataccatttgacccagccatcccattactgggtatatacccaaaggactataaatcatgctgctataaagacacatgcacacgtatgtttattgcggcattattcacaatagcaaagacttggaaccaacccaaatgtccaacaatgatagactggattaagaaaatgtggcacatatacaccatggaatactatgtagccataaaaaatgatgagttcatgtcctttgtagggacatggatgaaattggaaaccatcattctcagtaaactatcacaagaacaaaaaaccaaataccgcatattctgactcataggtgggaattgaacaatgagatcacatggacacaggaaggggaacatcacactctggggactgttgtggggtggggggaggggggagggatagcattgggcgatatacctaatgctaaatgacgagttagtgggtgcagcacaccagcatggcacatgtatacgtatgtaactaacctgcgtaatgtgcacatgtaccctaaaacttaaagtataataataaataaataaataaataaataaataaataaaagaaaaatatttacatcttgcatattttcaaaaaaaaagaatcttttggctgggcgtggtggctcacgcctgtaatcccagcactttgggaggctgaggcgggcggatcacgaggtcaggagatcgagaccatcctggctaacacagtgaaaacccgtctctactaaaagcacaaaaaattagctgtgcgtggtggtgggcacctgtagtcccaactactctggaggctgagacaggagaaaggcatgaacccgggaggccgagcttgtggtgagcagagatcgcgccactgcactccaacctgggcgacagagccagactccgtctaaaaaaaaaaaaaaagaatctttttttttttgagatggagtctcgctctgtcacctaatcttggcttactggcagcctctgcctcctgggttcaagtgattctcatgcctcagcctcccaagtagctgggattacaggcttgggccaccatgcccagctaatttttatatttttagtagagacagggtttcactatgttagccaaattggtctcaaactcctgatctcaagtgatctgcctgcctccgcctcccaagtgctgggattacaggtgtgagcctccatgccccgcgtaaattaagaatcttgagatgaaggagccatcttggattatccaggtgggcccaaggtaatcacatgagttcttataggagggaggcaggagtctcagagtcacagaaggagatgtgaggatggaagcagaggccagagagagcctggaagatgctatgcggctggctctgaagatggaagaggaggccacgagccaaggaagacaggcagcactagaagctggaagaggcaaggaaagggattctcccctgaagccaacaggaatgctaccctgctgacacctcaatgttagtccaccgagatgtacgttagacctctgaccctcaaaactgtatggtaacaaatttgtttttttctttttttgagacagtctcactttgtcacttaggctggagtgcagtagcgcatcacagctcacttcaccctcaactcccaggctcaagcaatcctcccaccttagccccctgaatcactaagactgcaggcagacatcaccaggtctggctaatttttaaattttttatagagatggggtcttgctatgttgtccaggctggtctcaagctcctgggctcaagtgatcctcctgcctcagcctcccaaaatgctgggattacaggtgtgagccactgcgcccagcaatttgggttgttttaagtcactaagtttgtgatttgttacagcagcaacaagaaatgaacacagctccccagcacaaatgtataattgcaacacgggactgtggtgagggtagaggagctctttctcctcctcatgcccctcatccccttgcccagtgtggctcccactctcaaacctggctctgtgccaactcctgttggcatctacctcacctttgactccagacctacttctttcccaccaacgtctcccatacctgggcaaaactttcagcaaaagtcacaaatagactaccctacccactcctcctttaaccacatctatttctggggaatgagggaggtagggcatcctagtttaaacaccagcaataacagctgcaacccaaaaacctgaggtggaagcatctggctgaacgtcttggggagaaaaatgaattcactgacataatgagcgtggaaaacatgtgctaagcattacacccaggccattgcttttgatgcaaacttccatgttagagaatccatgcatgtcccaaaagacaaaggctcagattcatgacctaaggtatgtgacctttaaaaaaaatacctgcacctgcctcttgcccttgtcatgacaggaaccaggataaacaacatcttccaaatttcctcttacaaaataattgtggtatgattgttcaccctttattaagcaccttaaatgttctcaatgtccaagaacatgacaatgtaagtggacaaaatgagaggcagccagatggaacaggtgatgtcagccatcagcagcggcaatcacaccagaattctgccaccagtgtgggtgtgtgtgtgtgtgggtgtgtgtgtgcacgtgcaacttagtaacttggccacaaagttagcagaacaaattgcttggaagacaaaagtttcctaaatttctccttttaaaacttaattgagaacacctcacaccttcttgaaggacagttgtgccttgtcaattccaatacagaggaaattctaataatcaagggtcaaactggggcacctttttttccttaagtgaaaaagcaagcagtgcccaacaggaaatccttttgaggcccataagcctcagagaaatctgctcatacaccctctctggtatatttcacatttcaaaacatacacacatgagatgagctggtcgcaaaaggacaaatactgtatgatgtcgttgatatgaagcacttagagcagtcatatccatggagacaaaaagtggaatggtggctgccaggggctgggggaaggtggaatggggaattcgtgtttaatggatatagagtttccattatggaagatgaaaaatttctagagatggatggtggtgatagttgcacaatacatgaaagtacttaataccactgaactgtatactcatagtggttaaaaatggtaaactttatgttacattttattagaattttaaaaaatcccataaacacatacatacaacacaactccaccaaatgctatttcctcacactgaatcatgaccataaacacctagctgtttttttattttgaatggatcatttcattggttggaagccctcaggagactggggggtggaggggtccagctgtcccgcttgggggtgggacttaccggctcgctgatgggggacctacctggtttgaaagtgatgctcgaggtcacagcgctgcaacacctgggtgcagtgctccctgaatgggcaggtcaccagtagcttgttgaggagtttgttgaccaggatgctggacttcttgcagtgctgcagaaccagaggcttgcggtccatgggacagaagtccttctccaccaggaagttggtgaggcagagggtgcagtaggtgtgtccacacggagtgtccagggggtccagcaaagcctgcaggcagatgtggcagatgaggtcatcatccacttcctctggatagctgtagaagtggttttcctccaaggagtgggcttggccacacactgcacacaggggttcaggatcgttggcagactctggctggttcatgatggattggagagcagtataacaggaaactcagtcacacaatatttcctcaggagcaagtcaagatctaggagacatccacacacctaaaaaagaacaagaaggctcacctttgcttcccagcacatgaaaggcttatgcttatggtagacatgagacagggctgccaatgcatggggaattgagctacgattcagaaagccagggttgagggtccactctggagtgactgacaggaccttgggcaagccccatggcctcctcgtgcctctgtttttccacgcatgccagtgggaataatgttcacctttcacatcctcacattggtgtggtaagaatcatttgggtaatatctgggaaatgcctaaagtaactctaaaaaatgtaatttgttaagaaaattaaatagaccagtgatttgtaaaattcttgtcagatcaggacaagaaaaaaaaaacaaaaaacagttaacactgtgatggctttctcttatctttcttccccatctttctcccaaactcagaaaaagtaggagatcagagctttcaactaagtcatctgagagaaaatagtgctgttgagcctttcatattttcactatgataaatgcactgttgtctcctgtatgcatttcactcagttggtcgttagtggctaagtgggctctggacactttgcctgggttcaaatcccaccactatgggccaatgatttcagactctgttttcacatctgtaaaatggggataatcacaggctacttcatagaactcttgtgaggatgaaatgagatatgatatataaagctcttagatttgcatctaccacatactaagtgctcaataattcttacatgtatttgttactgaattcattgtctctagtctagctctgttggcccagaaactgaaagctagagctcctataaggggcctttaagctttgttctaataggactcttttattccattagatatttcgttttttttttttctttttagacggagtcttgctctgttgcccaggctggagtgcagtggcatgatctctgctcactacaactgccacctcccagatgcaagtgattctcctgcctcagcttcctgagtagctgggattacaggcgcgcgccaccatgcctggctaatttttgtatttttagtagagacagggtttcgccatgttggccaggctggtcttgaactcctggcctcaagagatccacctgctttggcctcccaaagtgctgggattacaggtgtgagcccccatgcccagcctagatatttcttttaaacagtagaatactaccacaatacatattttcctttaacatagataggagtcaacaataatcaagtttttcaacatgcttgctttgcatctaggaagtctcttgcgtagaaagtcaataaatagttttcaagcgccaactctgagctaggtcatgagtttgatatgcagacctttgagagagacttaaaggatatgcttctgccctcagggagtccccattccagaggtgacatggacacacacacaagtaggagcccagtgcaaactagggctctgggtcaactttcatggtgattaagaatcccaccttgggaccaggcccgcttttggctgcattggctggggatcactggcaccaggtatctgcatctgggacccaccccctgggctggctaatcaaggaggaagcagcagcagtgtctgctgtgggggccacagctctgtattgcatcatcctggtggtagtcacagtggccgagtgagtttcttgggggcccagcttcctccagaggtggcagcaatggaccagctactaggggacctaaacaggagcatgtttagaaagttgctgaagtttgtggtcagcagcctgcaaggggaggactgccgagaggctgtgcagtgtcttggggtcagcaccaacctgccgcaggagtggctgggtgccctactggcaggcatgcacacgctgctccagcaggccctccatcttccccccaccagcctgaagcccaacaccttcagggaccagctccaggaactctgcatcccccaagacctggtcggggacttggccagcgtggtatttgggagccagcggcccctccttgattctgtggcccagcagcagggggcctggctgccccatgttgctgactttcagtggtgggtggatgtgacaatctccaccagtgccctggctcgcttcctgcagccgagggtcctgatgcagctgaagctttcagatgggttagcataccgcttcgaggtccccatagccaagttccaggagctgcggtacagcgtggccctggtcctaaaggagatggcagatctggagaagaggtgtgagggcagcctgcaggactgacccctcacatgaccagtcctattcaggtcaggcttggacaggcacctcagatggtgccaaagtgcagctgactcttcccaggacagccctgcccttcccatgaggcaggctcttcatccaggtgcttttgtagatcttgtattttaggttgggcattttcattcttctgccttaaatccctgacttcacagagctgacattctagtggggctaaggggaggggaaacattataaaataaataataaaaataaattaaaaaaaaaagaatcctgcctcttccctcagccccaactcaactttcctcttttccaaaagtaaattaaaagaccttatgctttccacaagaacataaagacacacgaataacctaacaggaaattagccacatttggaaacagcccagcagtcataaactgtattatatctcttttcttttccaaataaagtcggaggttgtttgtgcaaacatagccttatctcaaaaagaaaatacattgacttcaggctttcattgagtcagctttgttgtttacatttctgtactgcagtaatatgcctgagaggacactctagtgaagaggttgctggcaaatgcccttaatataaaaacatttagaaattgtagcattttatttagcatcagataggaccacagaaggcaaagatagagggtgcaggagggggtaaagttgtttcaaggaaatctgtatctatgcagctgctgattgtcctcaaggctgttagaaagtactggaatctcacaggaaatactttaagtgacatcagaaacagttgaaaaacaaacatgaaaatggaaatgggccatgcaaaagattatcatctacaatctataggggaaaaatggttcacacaggatgaactaaagctctaggtcttttaaagcttctctgtagtgttctgccatatagtcccacatgctacagtcttggttattctttctcatgatgctgtaggggaatataaattcaggctgcagtgcggccataccactgaaaatacaactgcatgtttctgggccattcccttgttggtgaaatggtggcattggaccagattttcgtttttcaaactgtgctgtggaaggcatcagatacttccagatcttccaagggagtggagataggaggaaaccaagggggagctttgcccactcctccagctctgccattactattattattattttttaaagatggggtcatgctatgttgaccaggctggtcttgaactcctggcctcaagcaatcctcccatcttagcctcccaaagttctagggttacagatgtgagccaccacaccccgcctgccattatttccttaatgcatcatgttcctcttaatattctggtcaaagaatcctagcttttaaaaaaaacttgcaaaccaccagactagatcgtgtacaacagtcccttccagaaatagagttctatgattctgtgctaatcaagtgaggtttttatgttttgttttgtttttgatgatttgatgtttgggaaaaatccttttttcatctaacagttctttgaatatttaccatgcgccaggcactgtgctaggggccttatattatagtatattatgttattcaatcctcacaaatggcataggaaactgaaatgcagagggtaaataacttgtcaatcacaccaaaaaaagaaacaaaacaggcaggggctgtctgactccaagtttctgctcctacttccctactttgtctcccagaatctttcttgattatggctagtcagaatcccaataatgtaactcattaaatacaagagacccaggaaattagaaagctttaaatctcttcaggctctattgcaagtagaatcatgtgttgcttaatgatggggatatgttctgagaggtgcattgttaggcgatttggtccttgggtgaacatcatagagtgcacttacacacaccttcacggtatagctgactatacaccatatagatgtgtagtctatggctcttacgctgcaaacctgtacagcatgtaactgtaccaaatactgtaggcaactgtaacacaatggtaagtatttatatatctaaacatagaaaaggtacagtaaaaacagtattttaatcttatgggatcaccatcatatgtggagtctgtcattgaccaacatgtcgttatggggtccatgactgtagatatgtcaaagatctctgaagaaaaagattccttgatttcactgagtgctgaggcagaatgaatggaatggagtaagcaaaaatggcagatttagctccacctccaattttcttttatcttttcccttcctttctttttctttctgagagcaatttgaattccctggcacttacccatgtggataaaccaaattcttaatattatgttaatgtaaacactgctgtatatattttctgactttattttagactaaataaagcctacatgaatagaaacagattatgagataattgactgaacaagcagttttggctctaagggaaagaaccaggtagacttaaaaaatatgattaatatctccctggtggttcttatttgcagtgtatagcttataaacatgtatgatgtatcacgttttcagacatatcagagccttgctgctgaatggagaagaaattatcaaaaatcattaagcctgaaaaggtaagctagtttctcccaccaaaagtaagagagagggcctgtcagctttgtgtccatataaatttactgaatgtatcagccatcagcatctctggccctaactgaagtaagtagacagagctgtgatacagtgttttggcagtttagagtaagaaagagtagtggagtggattgattccctccttacgtacgtgtatgatgggtacggtggaaatcttacactttttcagtataaccctgtggtgccttaggaatcaccctttccttctttctgatctggaataggacagaaaccagaggtgatttttagagatatatggagccaaaacccccaatctagtgctgaaaagcacccagaaaaataaaaacccccatctctttttggtcctaatccctgcttcctttcctatgattttattgtctagcctaaaacctgtatagaagcttctctgcctaattctcaaattttgaacttcctggatgacaataaagacacataccagagcaaaagccagttggtgccgcctgcaaccaagagggtcattcgagatcgtgtgtctactgtcaacgcactagacagatttaagaacagcctttggaatacagcctgtttggaagtggaaacatttctgcatcaggtaactcatcagaacaatgggatccttggtgtgctgttgtcctgctaattctcctttcaatgcaccctggctttatagaaaatggttatcagatgtagttgccagaataaaccacatactccactagaaggacaattggataaatataacatttggcatgtggcaacgataattttacgtgttcttcccattgaaaggacaagatttgaccctaaagcatctctgaaattgttgcctgagtcacagttttctagtaataggaggaggattccatattatgaaaaagaatccttctttatagtcacatggcggtgtgtcctgcattggcactttaaccttgtcaaagatgaaacactatagccacagactctgagtcaaaaggaagcctgacagatgagaaaggcctttattactttataaaatagatgattctacctttggatagctttgattaatagaggaaaaagtccacataatgagcaaaattttcctttcctatacctcacctgccctttccacaagtgccaccgttaccctaggagctctttagaatatgcctaactttttaagtcctttaattatttgaagacagatcccatgttctcccccagggcgagtagcctcgggttcagtcagtatttctttcacatccaaatctcttctgcaagctccccaatttatcagtgtctctcctataatgtatgggtagaatgaactccaaaactccatgccagagtgaagtgagggaatctgttcccttgatgtgactgccagacagcctgaaactgcatccactttcttgcagcaatagcacacactactgctgttactggagtgggtagaggaggagacactgccctgaggcctggagaaaacaattcctggaggtggtggaggaggtatatatcttacgagtaaaaaggtagaaatgaagaagtttttaaaaacaaaagcaatggctatgaatgaagcttagaaaatgcaaaaatatgtagtggcattaggtggatttatataaacagaagatagtcttcagtggctaaatagttcagtactggaactcataatgtatatccaatccttagaaccattgctatctgaggaatgtggggctctcttatttgtttgtaaacgttcctttactttgataaatctcattccaaaatgtaccaacatagtaaataacacaagaaaagggaaatgaaaaccatttaaacaaatgataaatcagacataatttttccaacccagaagtacaaaaatactgaagaacttccactgacattcactataaatgaaaaagtttaaacagtgacaggccacaagcaactgatggagaggcaatgggaggaaatgaagcctgcagctccaggtgctccgtgtccccaccccacccccaaaagatgcacaaatacttgaaaaaggaaagtatccaaggaggtatactggtcacccgggaccatgacagttgtacccttatcagttgcagcctgaggtcaaaggaaaaatgtatgtcctgatatgtacatttttattttttaatggctaatttttttcagatcattaaggaagttgaaaaatgtggaaaacatgaagagtaggtatatcaaaacttaaaacatcaatttaagtttaaatattttatttattctccaaacaattttagaaatagttttgttttcctggctttaaaggaaacacactcatcattttttccaaaaaccttcctctttgctcactgtattagtccattttcatactgctatgaagaaattacccaagactgggtgatttataaagaaaaagaggtttaatggactcacagttccatatgactgaggaagcctcacaatcatggcggaaggtgaaggaggagcaaaaacatgtctaacatggtggcaggcgagagaacatgtgcaggggaaccgccctttataaaaccaacatatctcatgagacttactcactatcgcaagaatagcatgggaaaaacccgcccccatgattcaattacctccccttgcgtccctcccacaacatgtggggattatggaagctacaatacaagatgagatttgggtggggacgcagccaaaccatatcacgcatcttgtttttgattgaggaaattgccatgtttgatcatttctcttaactaagtgatgatcttaaacaatttctaaataactttagcttactgatcttgtctttatttgaatacattttgatcttttgttcatcatggattgtttgcattcattttgcatttttttaaatattgcattcacattaggattactgaatttttctgcaccttaaattttgcacctgaaggtgagtgtctcacttgcctcaccttaattatgaccttgtcactgttaattttagaaacctaagaatatcaaaactgtggtttggatgcagctctgctaccaactacttttttggatcttgatattttccttttacctgacctggtggccagccagctacaatgacaaaacagtagaattacaaactcttcccaggtgtgccactaaacttcacccaaggtcagaattgattgttgcttcagctgattgttacacttgacagagacacacaggtgaacagtttgctgaagggttcacaaggcaagaggaatgactcgcttcaaagaagcaaagaatgtaacctagggccaggtctcacaaaagatcacaaaacgaccggatcctgtaagagctttgtttcatgagtacataagcgagcccagtcaagtaataaagagttctctccagcaaggacaccacatggaatgtgacattttacaaacagtgtgaggctctgccctactgtattcatgtttgctttgaatttttgcacatttaaaagttattcaaaatattttactcccttcagccaacctcttgttttacagcatgtttcaaacacacaagggctaactctatatcagattatttctgaggttacttttagcttcaagaaaatgagcttaagattttttgtttttttgttttttttttaattgttgatgatgctttaaaatttggattaagctccatgtggcagaatggttgcttagtttcaaactggtcactggggtgacagctcagtgcaaaaatcaccatcacagtcagaaacaccatcctggaccacgaacagcagaaatatacccacagaggaaccaaacagaccagcgcctgccacttcttcaaatggtggcctcatctctctttctaaaataattcacccagcaggcatgtctgcctaactactgccctggccctagctgtaactcctaaatcaggttactggggggaaaataattgccaaagttagggcaaagtctatctttctgtattaaacaaagtaaatgtacaattacattttaaattttagataaatttagtaagacttgacaggatcgataatgtgccatcaaactcttatggcaattttataaaggccaattgtaaatgaacatacacagaggatgggcagtgttctgtgggctattccttagcttacagactctcatgtaatagggaagaattaggagcattaatgacctggataaaaatagtcacacatggaataaaattatcttcaaactaagaacctgggttggaagtttggggtgatgtgtctgtgtgtgcatgatggggggcaaatacactgcagaggaaagagtggggaggcaggtgcttacaggctgccgccaaggtcgtggttagctctgcttctgcttaatttctaaatcaatgatctcgaagagggactaagccactcattaatgaatctgtgaatgacattagcctgtatagtattgcaaacacccaaaaatacagaaaaaaaaaacccttttaaatggtctttaaagaggtcagaaacatgtcaagaaattacaggagaattgaactaaagggagaccatgtaatacatctggagtcaataaaggaggacatagatgttcagaatgtgggaaaaacaagggaagtggttaagcgaaaagagtcccaagtggctagacaattagacgcaagttttagaagtcagggaatgcctttcataagcaggttagagaagagtgttccttctcttgacgagattttaccacctttcccctggggtgccatacttgggtttgtttgtaaaaactctgtaacagaaaagatgtccttccatttcctagtccataaacatgatgaaatagaactgaccccctgcaaacaacaacaacaacaacaacaacaacaacaacaacaacaacgacaaatgaaggcagagtatttttgcattgattcggagctctgttcatgctaggagtcaccaaggatcccgggaagagctgatatcagaggggtatggaaaagaagcaaactgacattctttcatccaaagctgaaaaacaatttcaaaaagtgtttatgtgtgtatggttttttttctgttgttgttgttttttttaaaacagataaccaagttttacagagggaaggacaagatgaggaaagatatttgaattctcaacattttccggctgtgtttcaattctacaggggtcatggctttgcctaatccatgcctgggattggccttaaactctgtgggagttcctgtagggaattccatttcatctccaatacatttaagtctaattatgaaaacagagtttatccacaggaaaaaaaatgtaaaaacactgcaagagaatacataatacatggcaatgtgtataatgccccaagacaggagccatggacaagctttggaggagagacaatagagagtgcatgtggcccagaacaatcaaggaaagttaatgggatagacggtccttgggaaggatcacgaatgataaatgcgatctggacaagtgggaagtaatccaggtgagaagaacctgagcaaatgtgtcaatcaaggaagagtagtgatctcttgatgtgacccatatgacgacctctatgtgaggttttaaaatgatttatttagaagtcataggattttgatcggttaaggaacttagattttcaccaagtagaaaaatcctcttttcaagatccctacagcacctaccagcttctatctgaaacacttccactgatggagaactggtcagtttttcaaatagctagtgcttcccacgttactttgacctttggccttgttctgcctttcagtgtaacgtatatcacatttgcttactcaaaacatgacacacacatccccaaattaaagacagcattgggtggttcctcccttgtttttatctttgtctttggttcttccaattgtcttcctgggtagtccagatggtggtaaaagatctacccaggatgccttctagtttgttaaggtccctttgaaaacccgtacctggaagtgaagttatcctgttttggtttggaggactcaggattcagtggagtgatcacttccttaaccaggatactatgtgtttactaatgcaatctatgatggtttttactgttttgtcttattagatatctcacactgttgactggaagaactcagtaggcctttagagtacaaaacacttactactgtggcatgaacatagaaataaatgaaggtagtgatgatggctgccaattctgactctccttgcctgtactttgctcagtatttcagcctccaagtggacaagaaatctctccataagtagttggaagagcttgtgtatatggttgtcagctggggatacagtgggtagaatgagggtccctgcaaaagatatatccatgtcttaaccccagaacctgtgactatgaccttacaggaaaacgatctaagaaggtgtcatgaggtttaggatcttgagatgagatcattctggattatctgagtgggtcctaaattcaatgacagatgtccttagacacttataagacaggaggagaagacacaaacgcagaggagaaggtgatgtgaggagagaggcagagattggaattatgcacccacaagctaaggaatgtctagagctactagaaactgaaagagaccagagaagaccctctcctggagccttcagaggagtgtggccctgctgttacctttatttcaaacttccagcctccagaactgtgagacaataaatgggagttgttttaagccaccaagtttatgggtatttgttatggcagccctagaaatacaggggttacatatttccaggggtattcctgcaggaatggggtgaatgctcccaacgatcctttccaacacttctctatagggcttagaaatagggaaaaatatttggagacagcagccacatagattgctacatatttagcaactctaccctattagaaaatgtattaatttccctttaattcattaataagttagaatacagatgctttcagagatgactgttagactaaatttgcaaagggcctcaagggaaaaaaaaaaggccacagatagaatggctgagtgtgtgtatgttgtggaagatgtaatataagtcagacaatcatatttaatgaggagtctgaaaacacatggtgactcatgtattcatgcgagtatgcaggagcctaaacatgctgcgctctattcagaaaaggccacgtgactgtcaaaagcagtcataagcaagttatgcaaatcatctcagcagatagcaatgacatatttagacctccccatcatgcatgtgctattgtgccaagaagctattaaagaaaattcttggagagtttcgactctgctgctggtgaagtcttttgtgtgcctgtgacaaatgcgtcaaacacaagaagcaaataagagtcacttgaaaaaaatcatggagtctaagtccacatattctaagtcacaaattagtgatgttaccaaaaatgtccccggttaattgggatagaacttgctcccactgttagaagtgtactagtcagcctaccatgccaaggaacttggctttctagagcagagagaagttctttcagatggataggtgaagaagggcaaaggcaaagagaacaagagtaaacagatgattgtaaaaactgcaaatctcaaattggtggatcatcttgtctaccttctacctgaggcagaaattctttttagaatataaaataaaaaataatgattattactatttaatgagcagtttgcaatatgcaagatactgtgctgggtattcaacatgttttttcatttaatctaaaataatcctatgagatcattaaggtaatcttcactttacagatgagtgtatgtgcagctgaaaaacacaaatcctctttgtcattcatttattaattcattcactcatccagcaaacatacaccatgcactaaatatgccaaaaaaaatgatcaccttcagtgacaagaaactcagtatcccaaaaggcaacctactacattttcggacaactctaattcatagaaagttcttcctcttactgatctgaagtgtgtatctgtgtaactaaccaaataggtcactgtggtgtcctcatgtcacacagaacaaaatggaggaaagggtaaacacagaaagtttacgggagacaacaaacgttttctgttcctgatttcagctcagtgtagttttccacattttatggtttttttatggttttcatgtcaaccctattctttggggatagttaatgattaaatcatattaacccaggaacagtgacacagtcttccttccaaacagttttgaaaagcctttgatactttggaggcattgtcagaggacaataaatttgccaaccacataaaagagagtctatgtaatgtcagtacataaatattaggaatagttgtatgctactgggaagtccatgaatactgaggcaatgaggaggacacactttagagcatctcttatgtgtcctcgccttgccagcatcttacagacggcatttcgagtagtcaagatcgtatcctggtcaagagagtgaaaggaaaaaaaaagtagtcaagatcccaccagaccctattttctccactttaagtgaggaattcaaatatagaaaggaagtcttagccaaggtcttggagacaaggagacagtgacaggtgaagccaggaaatcaccgctccaggaagacccgctgtttactcacatcacagaagcccactccccacaggtttatgaaagaccaggcatttccactggcagccactctaccctggaactccaagagaaacaacacaatctttgttaacaggttttcctcctctgcctttgggagccttttgggaaatctttttttgctcagtctttggccctcaacgtactaccgtttccatcattattacatccagatagtagcatgacctaagatgtctaactgtaagcaatataaaaatgtttaaaataatataacaatagttaacactcactgaacatttaaaatatgccaggcactttccatgtaattatttcaattattcctcccaacagctctgagtctgggaagtatttcatttcccagctgatgaaaccaaagcaaagaaatattaaggaacttatttaggctagcaactacatggtagaactgggtctgatacacagacctgtctgatactatcaactatgccttcctttcaatatttacaagtaacactgtggcaggtaccattccaagcactttacacatttcaacccatttcatcttcatgataaccctattacacagctgatgagagcagcttaaagaatctgtcccaggtcacacaggtagcacatggtagatctgggtttcaaaaacccaggtaggcagcctgatgccagagaccagaccactattctaaagcagtagcattgccccacctagaatggaatgaataagattgatattttctagtgaggcactacccagtccccccagtcagtctgacctacccacctggacatgcagcccaccttgcttcagttgtaaggatggagggggcctgtgaagtacaccattttagcgtcctttggggaaaaatgtagctaaggaaactgacatgcaggggggttgaggttctcccttagggctccgtaggcaagctagtagaacagtagaacccactgacctcaatccactaatcccttactcttgaatgatgaaaatttgtggtatccctgaagggcgagacccagagaagtgaccagggccctgggcacacaactgctcatatgcaatgactcaaggtcacccaagggcacagggtattgcatgacaaggccaatcacatccaatgggtcatgaacctccttctatggtacaatgaggctccaaaccaggggcttcctcctgccagaggctcggcatgaaccctcactctggttagggagaagggtgtttatctgtgagactggaggagaccaaacacccagtctgccctggagatagcacgactgacagcaaaaagaactctctgccaagtcagattacagcaatgacaactggacatttcccccgaaaggcccatggagaatcacattttgtgggtctgttgcaggatgagagccttagagtgggaaaaggaagaaatcacagccagccagcaactcctaaaagctttgcctgtgaggctagcggagacaaatctgcccaccttgtttgatgacattgtttaagaattctcctgcctgttttctttttccaaactgttaacattgcagttaattacctacaattaattacaataacaagaactatcaaggttcctacaactgcaaccacatatgatctttatcttgatagagtcagactctctcctccaagcaacctaggaaaattccttccaaaggaagaacctagcctcagtttagcaccagttaacaccaggcattggtcgctggatgctaacatatattagctacctcatttacttctcacaaccacattagatcatggggattattatctcccatcttaccgatgaagaaactgaaagtcagagaagtaacttgctcaaggatataaatgaaggagattgcacatttttccatcaggcctatgtccacttgaaccaatgggtggagttaccacaggaactctggacaggacttgtgtgtaaattacccaacagaccaactgcattctagtcaatctgactctgaattccagtctttgtcacttcttttctttcttctacctgggggtacagtgtctacagctttgttcctttagtactcagacatgctgacatacagtgatgaaattatttatttaatcataaattaactactgtgaaaagcactaatcaaccatggtaaaccagaggcaatgtaatcttgaggagaggtttagatgcacttttatcagaagatccaagctttgaatcaagtgagaaccttagtaagagacaagtggtggccaaacccccccccttaaactcacaagcttggggaaaataataaacaaaggtcagttaaggaagaacaatagggacctccaaacagtaagacagaaattagcaacaagaactgggcagattcttagtggtgaggaacgactgtctgtctaaggcaaaaatgatctcagcttgtttcaattcataccttgggagaatttacatgcattttgtatttctgggtggatgaacaggagcataattcctaacagattattcccttgcaaacatctgctaacttaaatctcagaaaaacagctgatgttggaatctagaatgaagtgtctcgcagatttatttctttttccagtttttccagctcatcccagcaggcagctgggcttaaaaatggtttcctttctctgacaacaatattggctaaagagtttgactattgggctgtcaagatacaggctgtgtgatcaggattaagaaaacaaaaatggatcctagaggtaaaattactttaaaagccaggtcctggcagaacaacttcctcggtatatttgctattaaaagaaaaagagacagaaaaagccaaagaggtccaaaaaattaaaaatcagacctgaagtcacattcttgcagcaatgagggaattaattcttactgtaaccaaaggtcagcaggcagccagtccaggtctaaatgtaaacaaattctaaatgcacactgcaaagtcgtatttaaaagagtgttcaacaaagagcaaagaaaatggtagactttttcagagaagagaggaaaactggaacgcacagcttctgaatagggcaacagaatttgccctgaggaacaggttttcagggggaaagaaaaaaaaactagggacacttcacaggtttagatcaaaatacagggaggaagaaaaggaaaaataagaactctgaatccagtctgcactggcctcctagcccccgttaaacgggctgaacagatctgcaccttcgcgctaagtttcaaaacaaaagccttcactctacttctctttaggttgttgttgttgttttaatcagatcaagtacgaggacaagcacaggctggattaatgatcagagaaacaaaaaggattaaatatctggcctgggagaagtttattgtgcaactagaatgtcaaagtcatctctctactcttctgtctcaaaaaagcttctccctctggggcaaacactagcgacaagccgttcagcttgtattttttcattcaaattccgtgttcagatccctcaggggccagtggtctaaatgccaagagagaaaaatggagggtttcaactcacctcttcaagcgactgtctggggctctccaagcagcagcaggcaggcagctctcattccttgtgggtgaaccgagcagctccttgggccgccggagttgtgaccagcctcaacttcggtgaacaggtgcctggaggaaggaggacggcattggtcgctccagaccaggaaatgggtgacatcacggaagccccgacagataaagcattgctgagaccttagggattgaaagagtcaggaggccccgcccacctgtcatttacctgaatacctgcaagcaggtaggtggcgtctctttgtggacaaataaatcagttagagcaatttgccaggtggaatttactttctttcctgagcacagcacgtgtccagccccgtgttcagatctgaagtcaaatgcctggttgtttcccaggccctcccctttccccatatctgcccacaaaggagttaaaagggaagtttaaacaccaaaatgagacagtaatttagcagacacaaaaaggaagagtgtgaagccgaacttcttagaaatatctgaggtgccttttcgaaccgcatccatttgaacaccaagtgtttctctaattccaataaaatgacaaatttaagttgacatttccaattcatcttttaaacaatttgaaataggatacctgtcagcagtttcaaagtggttttcaaacacttttgcgctaccccctcccccgcccagcatttttaattccatattcaggaatttgcaaaacttcagtcattcctatctcggctggcttggcagttagagtcatacggcagttacagtgcactgcaggcctgcaattaggagcaatttaaatgattcagattggaatggtagtactgtcattaggcgatgttgtctgctgatatagccaggaaagagacgtcagagttatttctgtcccaagcgtggtgtgtgaccctggacaagtcactggttgcttcaccttttccagcaggaaaggaggcgtaaactcatccagcaccagagcaggcagctgggaggtatcccaggactgttaaactctctggcatcttcccaggagggctgtaaacatctcccatcatcccattgaaacgctgcgtatttttaccacctgcatccagcatccctggaactcattacctgaggaaactgtggattccccgtcccggaagatggcctgcctgcccagagagaattttttttccccttcaggaaaataaatgttgacattcctattttcctcctacttttgcctccctcgtcttcttctttccctcctcctgattttgggaatgcttttgttccaccggttttaatattggactacctagaggttttggggtttggtttgggggagggtggaggaagaaggaaaaatgggagagggaagaaaaggaagtccggattcccacagcctgggcctcagctggctgcagtcagtcaatagctcgcaaagcaagggggaggagaaggaagagaaattgtagtcgagggcggggtctgggggccggctctggtgctcgacctcaggggagctggctcctgtccccgatccgccccagacaggtctaagctacctctttgcacctgggaactctgtgccttttgagagttgaaggcttaaaacaacaacaaccaccacaacaaaactattcacctttttatccaatagaaactaaggtaggtgtggctattcctttattatttaaaagaaaaaaagggaggtaacaaaaccttttacactcaggtgtttcaggaaaaggtttcacgccactagtttgataattgagaaacatcactcacacaaaggcccccctcttcacgcggacagggtgtcccctgggcaagggggaggggagggagagcccgccaacctgatgaatcatctagaaggccacgccttcagcggtcttgcctttggcgaagggcaggatccaacttgggaggggatcacaggcttcggttcaaggccttgggtgggcaggggaagggtgtaggtgaaatgaattcgcataaagcttcaccgaacagcctggagatcgtgaggtttcacttgccatgttcacatacacacagtcatctacatatgtggtgtgatgaattgttgtaaaacagaaagaaaatagagaaataagagttaatccaggagtggagctaactcccaggtatagtgtataaaggaagagaaaaaactacacaattagccttctcaggtgagatctttcttggtactcctggatttcgaataatatgcaggggttaaaaaaaataatatgggctttttttttgggccattagggctgttacattatcatggaaattatatttctaaactactagaaaaaaatgtaatcataaaaatgaacattgtgtttaacaggtgctacttattgttctgagcactttatacaagaaccctgtgtcaggtatcattgctatttgcattctacagctgggaaaaccaagacatagtgaatctgagaaactgcctaaggacaagctcatcggcaagcggcagagcagtttttaatcaaggcccactttttaaccactggaaagaaaagagggaaggttctgatttcatgctcactgggacacttcctggacacattcagcttcttacccattattcagaaggagaagtagaaacctgtagaagtagccctggggagggtagtttctgataaaggatgtctccatttggaaattaattagtaatctggtctatatgctgaaagtgtgtgtataatatatatatatatatgtatatataaatatgtatatattcataaattcatgcatatatttatgagaaatcataccaggaaatccatcgcccctgggtgcacacttgaaatcatcttttgagagcttatcaaatcaaccccaagatggaaggccagcttgagggacccctcaagaatgaccagttgtaactctctatgacatcttttatggtcatttttctctgtaacttctgcggcctatcactttaaaatctgaaaatttaatccgagtggccataagaacatggaactgcatacatttggaaaatatgagacaatgaaaaattaagtttcattataaaccactaccaggaagaatggtttagactaggcttggcaaatcctggacatatagtgctccattcccccctcccataccattctcactgtcattgctaaagaccatgacacttttcaactcagaaggaactttggaatcttgaagatattactccaggcacactagcagttggttttaccccccaagatcaaacccttttcttttactttcttactttcttttctttctttcttttttaatttttttttttagagacaactctccctttgtcatccaagctatagtgcagtggtgccatcatggctcactgcagccccaacctcctgggctcaagtgatcctcccacctcagcctcccaagtagctgggaccacaggcacgtgccaccatgccctgctagtttttaaattttttctagagatgaggtctcactatggtgcccaggctgttctcaaactcctgacctcaagtgatcctcccacctcggcctcccaaagtgctgggattacaggtgcgagccacttggtccccttttctatctctagttggacagtaagtgagacagagaagagggctgatcaggaagcaaaaatattggtgttggctggtgccattggggaatatttcatgaagaaaggaacatgaattgggccttgaacgatttggagaggtggtgagagggcacagatcattccagacagggcagtggcatgggtggaacaggaatgatcatagcagatatctgttggggaggaacatgtgtgtggtgggggagaagaggaatacgagacaatgaaatacccaccttgctagggtgaagaggatccactgattgctaaatttagatgggctgagactgtaaagagcctcgggaacctcaagggctaactgcttcatgtcctcacatgcctgttgactacttttctcatgatgattaaacagcttaagaaaaagaaactcagtatcttgggcatggggtaatttcttatgcatgacaatggttttcagcattgagctaaacttccaggatatgccatttcggcaaccacatgatctttctctttaggagcaagcctcttttgcagtcaacatatcctggaaactttgttctttggataggcaggtggaaaacattagaaagctttctgaactcaaagttgggcctgtcctagttaaccagccggctcacttgggctttttgattagtttgaattcctttatatatcttgacagggaaatctaaggggggaaggaggtctgtcttcaaagctcttttcttgtagatccccccatgaagcttggcgttctcaaggactcctcctggcaatgaacctacagcgaagaccatgccttgtgattcagcagaattactttgcccattttgcttcctatttttttttcccatgacatatttctagagttgtctatgatgattgaatgccacaattaaaatggacatattccatttgactttaataaaagtcatctctacaaaaacctctttggctatcttctaaaggtatttaacattatgatttggacttgcttattacattacataccatcatattggccgtaattacttttttaaatgggctcagctccatatcttttattggctaattatatgtgcttagcataacgcagatgagcagatctcagaagggcaattatgggaaataagagtaataatcacaaacatcagctgatgtgatagaatgccatctggttctgtgtatatggaagatattccatttctctcacaaacttacaacctgtgtgttgcctggtttgcagatgagtttctagggtaacctgtggacctacagtttaggaggaaacacttctctggtttgtgtgcttttggggagagagagagtatctcagggaaattagcattaaatcaattattgaagttggcgcacattttgtgaaagtttaccacactgatttgtggtcagcatgttcttctttagtagggagaaaaaaagaacttcattgttactgtgtttataatggtcacgagacctatatcttatgacaattacacatatttttatgtttctatgatctccattcttgcataaacagggtggattattcccagggaattttttggtggtggctgttgctatttcgaaggttgccatgtctttgttctttcttggatccttcatacatggctactttaattgacccagttccacataccagatttaaaatgtctcttctccttgttaactttgacttcatcctgaaggcttccacattcttgtagatgacccctccagcatccctgacttccccctattataatgacaatgacattcccctctacttctattgagtcacccattctcaggatcaccccttagatcttgttatcaccccaaaatctcccatttcaaaagaaatctgagaatgcaactctctactgtattttcttattcattcggatttttcattcccttcctcaaattttacattctttctggatggactgtactgtctggttcctggactccgggaggctgcccaagaatatctgttccttactagtttcactttaggtccatctagcccagatcctacttccttgccagcatcttcagcttcctaaggacctggcaaaaccatgttgccagcctctttttctacgagcctggagatgagtgcctctacctatgtatgctttgcaatgctagctgcacttgtcactctccttggcaaactatcaattgatattcctgatcagtccctcttcctggcaatccatcaattgatattcctgatcttttcagtagtcattcaccctcagctcctttgccttgcctggcctgtgaggctttttatgatctggcccctgtctgccttcaaactttatccatatctctgatcctttgcaagcacagaatgccaccacctgccagcccccatgccatagtaacactgtgttagaggggtgcactcccctcacccccatttccatagagaactggttttctaagcacattctggccatgttccacccttcattctctctgtccctgggagtccttgactggtaaaatggaaatggacagcagggcaaacttgggtttgcacctctctttcctgtcttgaaagtgagccagagctttcgtctgtggctccacactctgagtctctccagggcagatttctgtctaggaggctgccatgcctacatctgcccagtctgagtgccttctagctttgtttcccttgttctaaccttgttctccaatttagccattgtcatttcaaaggtgatattttggcctccaaaattattcttttaaaattttctcaaactatcctgaacctaggtgaggaaaaggggtcctccttgaatactccccaaacctgactgtctgtggttctcataacaaccagactggacatttttatggttatttctcacatttgttgaaccattgcctagatcaatgttatgctctttgcccatgttctgaatcctggcaaaaaaatcccatgaactaactacaaacaggtgaagagactgagtctctgcgaggtaaagtaacttgtccaacatgcctggttggttatgggcagacttgagattcagtcccaggcagtattattcctccatctgcagggctcagctcagataccatctcctttataggaccttcctgacttccctaagcagatattgatgcctgttctgcactcgtgacatactctacttcagcaattattttactgactgtgatttttttttttttttgagacagggtcttgctttgttgcccaggctggagtgcagtggcacaatcacggtttactgtagccttgacctccttatgattaagggattctccacctcagcctcccaagtacctgggactacaggcatgcaccaccatgcccagcaaatttttgtattttttgtagagatggggtcttgcctagttgcccaggctggtctcgaactcctgggcccaagcgatcctcctgccttggcctcccaaaatggtaggactagaggtgtgagccactgcacctggccctgactgtaatttttaaagactgtttcctctctagacagcgaggaaaggaatgtgactttccacgtactctcaggacttagcctggtatctggaagaaacataggaggcctttgataaatattagtttaaagaactaaagatgaatgtaagtcaagggaaggaatggaggaagggagggcttactcgttgttaagttacatcttgagtcatctcttcgttttcttgagagtcaaagcctgaacactttgggaagggagctaactttatcacatttaattttcacaataattcacaataatgaagacattaattcattcacttatttatacaccaaatttattaagcaccttcaatatgacaaagatggaaagaatctctgcatttgaggaacttagagtcaataaggaagcagagctaaggacaaacaattaaagtgtaaggtagaaattgcttaacagaggagtgttacagatgcagttacatgagacagcaggccagattgtttcttctaactttaaggctccaagttattataaagtactttcctgagtttgcagagctaacatttgagtggcatgtgaaccagggcaattcatcttgaatagggggtgtgtaaaataaggctgagacctattgggctgcattcccagacagttatggcattctaagtcacaggatgagataaaagattggcacaagacacaggtcagaaagactttgctgataaaacaggttgcagtaaagaagccagctaaaacccaccaaaaccaagatggctatgtgagtaacctctggtcgtcctcactgctacactcccattagcgccatgatggtttataaatgccacggcaacatcaggaagttaccctatatggtctaaaaaggggaggcctgaataatccaccccttatttagcatatatcaagaaataaccataaaaatgggcaaccagcagcccttgggcctgctctgtctatggagtagccgttcttttattcctctactttcttaataaacttgctttcactttactctgtggactcatcctgaattctttcttgcacaagatccaagaaccctctcttggggtctggatcgggacccctttcctgtaacagtgccagttgactatagagcccatgattttcccaggtcccccacagccttatcttggctcttatccatgaagggccaggcagaggaggctcatgggaaccaagactgaagcacactttcagattctatgtatgtcacccgagaaaacctatacctcttatagctttagaatttgcacaaatgtagaggcagctgctctgagtgggtagaaagactatgtatatttcagatatggtctcagtttcgtgcccacagtcagggctggctggcattgcaccttgggaagaacttgaaaaagatctgtgctcagcaggtgacagtaacatctgtagctgtttagatgaatttaaaattcctttaaggtagagttggcagctcagtaacctttttaaaaaggcccctctccccaataccatatgctttttaagtgttgtattatttaaatccctgttaattctatttttatatagtcagtgctcagtggataggagcaaattactattttcctcacatcaatcctccacgcacttgctgttttttatgctgtccaatagagtactctgtcctctaagagcccaaattcttcaaactttttcccaaaggggttgaaaattcataataactagtaacataaagtgactcgaggacacatgcacacaaaaaaaagtcctagtagggaatggagtgggaaaggcaaaagccagaggagaattgttttgctggcctactcaggtacgagaagcacaggagaagccaactttctaggtgggaaagtgttttccttcccaggaacttttgcttccaagaaagggcaggccctcaaaaacacagattatggccaaggagctcatccctttatttatcttaaattaaagaatacaagaaagagaatatcatgaaaaccactcactattaccagagagaaggactctcagtcagattccgactaacagggtctcaatataataataggggaagttcatttgacttttctcaaatcacgagcatgtgaagacacccctttttaacttggacatgaacctggatggacggcctctgtttttttatttttatttttatttttattttttcaatttttgagacagagtctcgctctgttgccaaggctggagtgcagtggtgcaatcttggctcactgcaacctccagctcctgggttcaagcgattttcctgcctcagcctcctgagtagctgggattacaggtgcccaccaccacacctggctaatgaaaccccatctctactaaaaatacaaaatttagccaggcgtggcagtgggcgcctgtaatcccagctactcaggaggctgaagcaggagaatcacttgaacccgggaggccgaggttgcagtgagccaagatggcaccactgcactccagcctgggggacagaggaagattctgcaagaaagaaagaaagaaagggagggagggagggggggagggaaggaaaatatctgagaagaggcttgcattttgtatttaaatatattccactcagttttatgaatatggaggtttaggagttaggagaagtgttattaactagaccggggatccctaagttccttgtttgtgatgtcttaatttgagtctttgtccatatcagtgccagccatcagcccagggtggccagactggtccttccagttgtggctgtccccctgaagtggcatggtccacccctctcccactttcgctgagtctgcccagggggtggacaggaaatgcagctttgacaagttctgccatgggtatgctcgcacccccacattgggtgactctcactaagtgtcttgccacgatggccagtccttctaagtgattaggctgcacctggaccaacactgttcgcgttctggccacctgcccataaactcgcagcagctgtgacaactgcgtgagcctggtagcaagcccattgtcccctgggatgctaactcctcaatgccatgtggctgcgggggtttggcagaagagacagcagctgtgctaggtatgtcccctcctcatctgtgccccctagaggcagctgcacacaccaactcatctgaattcgaagctaggagatctatgaggctccagctctactttcaactcatctcaagatggcatcttctccaggataaaggaataaggaaccacatgccaggggtcactgcaggtcactctgaagctgccagtcatctcaaagtcaaactctccaaactggttactgctgtttctccctgccctgcatcccctcttctgcataccaccccattctgtagaatctataccaccaaccctcctcacccctgctcacgtgactgacttctccagtcagcaccattgtcctcccctggaaatgatcccatgaaatttcataaaacatcaaaaatggcttcttgtcagttagccttatggttctactggtgtgatagaaatagggacagagtgagaaatagaaactaggatctgtctgtgcagaaacccaaggtagtgaaaatgaagttactctccgaagtgataaggggatggatccaaatctgtgaccttgacatcaccatctattctaggtcctgcaagcaacagatgccaagacgaaattaaatatgcagggacttgattagggaaaatacctgtgtgagcaacaggggatggaggctgagaaaggctgggagagctgtcagaccaccatccgatctgacaccagtgaaggagaggagggaaggttaggtggaactgtacctgggccaacatcagctgtcagagtaatcccaactttcaggaacaagcctgtcttagggtcctgcagcactcagtcactctgacactgaccaggagctgcaccttgaagggtggcttgctgcaaatgcaggggtggcttttagagtgcagccacttgagtcctttgtcagtgacacctcctataatgggcggtctgtgagggcacttgaatggcctttacacgtggtgactaaactaatgaagtagctgaggagatggggagtggagtccacaggacccaagtcaagggaaggcaatcaggatattgtttcaaggaatgaaaaacacgtgttgggtgatagttcacaaggcttcagtctgatcacctggattgggctcagtgtgaaggaaacagaaagtctgtacatccatgacatatcattttactctattttaaaacaagccaaatatacctgaaagcatagaaatttcaaagccttgaaaaaattcttctgttttcaagtttgccttagcactgacagtagatgtgaagctctgagaccacttttgaagctagaaaaggcaaggacaaaagtacagagacagtgagtttcatggacatcttatgacctttctgggcctcagttccttcatccctaaaaagatccctttcaagtctaaaattctaaaatcaatgctcagattggcaaagtttctaataatcagggaaagcagttttccaggatccagagcaccacagtgtcactgtattaaggcagcaaataaatcagccctggttgtgctggccgtggggccatggaggactccagggtggttgcagggcttccttgggagccgactcctcactgcatgtgaggacctactcattttcatattcatggttcctagctcatggggaaactcaataacatcttcattaaataaacacacaaatggacaaaatcaatttgggaagagaaagagaaaaggattggggtaaaaagtgatgtgaattagcagagctgggttataggcagggtggatatgcagctggtgtccaccatggagcttgtgttaggccgttcttgcattggtataaggaaatatctgtgactgcttaattaataaaagaggtttaattgcttcatgattctgcaggctgtaaaggatgatgcccggcatctgctcagcttctgatgaggcctcaggaagcttccaatcatggcagaaggcaaaggggaacccatgtatcacatagcaagagcaggagcaagagaggcgcggggagaggttttaaaccacgtcttgcaagaactcactattgcgaggacagtaccttggggatggtgctaaatcattcatgagaaatctgcccccatgatctaatcacctcccaccaggccccaactccgacactggagattacatttcaacatgagatttgggtggggacaaatatccagactatatcggggctgtaccagcaattgactcctgacatctgttctgactggtcagagtctgttctgataggttggtgcctctactgattattaaatattttatgctataccaattattaaatattttgaaaaccacctactgttacatgggctatcatattgcctagaatatttggtgatggtttcataaatggaaagcaattgatttctgatagtcattccaccgcaacctaaggtcaccatatctattaataattcctgtagatggtagtgggatggagggtgatttaatcaaattgatgacaatttgaagttgccaaactgctgatttttgttctacccttcgtagaagacaatttgtattactctttccctgctgccccactagaaatatattagcacctaaagcttgtatattcatttatcacaagcataatatgttctccttaagctggatagagaatgtttgagttaaaaatgaactgagaccaaagagaagtgacctgttattcaagtccttatactcacaaatgcttggggcaaagggaatgtttggagaaaagtgatgaattctctagacttaaaagccagttggataaaaagcagaactggcagagcctatgccaatgtgggattatggatgcaggaagaagcaagaggaagtagcccaggaacttacagaaattataatgagggctccgaattcttatgggttgtggtactggcattcaggccaggtttaactagatgtccaaaggctgtgcagggggatatctgatatctggaatattcttaggctcaattcgtttgtttcttcatttgtttcttgcaaccaaaaatgaattatgaatatcagtccaaagtcagagacagactaatttgtttctcatataatgaactagaaggtatatttctaagactaaggatttgtgcttgtgtttggattggagctgagcctcttgggtggggaagacaggtcacaggccacctttctcaagaaaagaggctgcaggggcagaaaactggaaacatgaagctgtatatgtatagaattccagggcaagtaaaatgtaaatgagtgatgaaacaacatcactcctcacaacccgggtgatttgcaaagtcaccagggaatttcaggacacctggattacaaaaccatagcaagacttggagtccgcattagcatagtgaagtggaagctgccagctcagttaagggctatgcctagaactggcatagcaccacttctcccatgttctcgtggtcaaaggagttacaaggcccacccagatgaaaagggatggagaaatagattctacctctggatggggactggcaaagtcacattgaagagcatgtggaatgggaattgtgttgtatggtagccattttggaaaatacaatctactgcaacagatgattaaaatacttaaaaagaaattttagtgtgttatcgtctttaaacattgtacaaatttaaggtgtataatgtgatgttttgatgtatattttattaaagtgattactagtcaagcaaattaacgtatgcatcatcttacatggtaactaccttgtgtatgcgtgtatgggggtggggggtaaagtacctaaatatgttcccagtaaatttccagtatacaatacaatatttgtaactataatctgcatgctgtactttagatctctagacttatccactctatataactacaactttgtatccttggcctacataaccctgtcctctcacccccacacctggtaaccatcattatactctgtttctctgtattcatgttttttttaaaattccatatataagtgaaatcacgcagtatttttcttgtctgacttattttacctagcataatgtcctctaggttcctccatgttgtcacaaatgagaggatctcctttttaacagctgaataatattccattgtacatatgaactataatctctttatccatcatctatcaatggacactttggttgttttcatagcttggctattatgaatcatgctgcaatcaacaacatgggaatgcagcaatcaccagatatcagctggtgattccgtttcccagaagagggattgctgggtcatgtggtagttctatttttatttttttaaggaaccattatacccttgccaattcttatcattccttgtctttatcacaagtggaggaactagataaacaagagcaaaccgacacacagttagcagaagacaggaaataatcaaaatcagagctgaaccgaaggaaactgggaaaaaccatacacaaacccaacacatccagaagtttcttttttgaaagatagatagaccactaggtagactaataaagaaaaaaagggagaagttccaaataaacacaatcagaaatgacaaaggggatattatcactgaccccacagaaatataaaaaaccctcagaaattattatgaacacctctatgcacacaagctaggaaacctagaggaaatggctagatccctggaaacatacaacctcccaagattgaaccaagaagaaattgaatccctgagcagaccagtaatgagttctgaaactgaatcagtaacaaaaagcctaccaaccagaaaaaacaaacaaacaaacaaaaaacaaacaaaaaaaaaacagaacaagacagattcacagccaaattctactggatgtataaagaagagctggtaccactcctactgaaactattccaaaaaattaaaggagggactccctaactcattctatttggtatcatcctgatatcaaaacctggcagacatacaataaaaaaagaaaacttcaggccaatatctttgatgaacatcaatgcaaaaatcctcaataaaatactggcaaactgaatctagcagcagatcaaaaagcttatctaccatgatcaagtaggcttcatccctgggatgcaaggttgcttcaacatacacaaatcaataaatgtaattcatcacataaacataactaaagacaaaaacccacatgattatctcaataggtgcagaaaaggcttctgataaaattcaacatcccttcatgttaaaaaccctcaacaaactgggcattgaaggaacatacttcaaaataataatagccacctattacaaacccacagtcaacatcatactgaatgggcataaactggaagcattccgtttgaaaacctgcacaagacaaggatgccttctctcaccactcctattcaacacagtactggaagtcctggctagagcagtcaggcaagagaaagaaagtaaggaaaggcatccaaatagaaagagaggaagtcgaactatccctgtttgcagatgatatgattctacacctagaaaattccatagtctttgcctaaaagctcactgatctgataaacaacttagcaaagtttcagggtacaaaatcaatgtacaaaaatcactagcattttgtatacaccaatgacatccaagctgagagccaaattgagaatgcaatctcattcacgatggtcacgaaaagataaaatacctaggaatatagctaaccagggaggggaacaatctctacaatgagaattacaaaacattgctcaaagaaatcagagatgacgcaaacaaatggaaaagcattccatgttcatagataggaagaatcaatattgttaaaatggccatactgcccaaagcagtttacagattcaatgttattcctatcaaactactaatgacattcttcacagcattagaaaaagctaatggtgatttattttaaaattcacagggaactaaaaaagagcccaaatagccaaggcaatcctaagcaaaaagaacaaagctggaggcatcatattacccaacttcaaactatagtacaaggccataatagccaaacagcatggtactggtacaaaaacagacacatagaccaacagaacagacagcccagaagtaatgttgcacatttaaaaccatctgatcttcaacaaagtcaacaaaaacaagcaatggggaaaggactccctattcaaaaaatggtgctgggataactggctagccagatgcggaagattgaaacagtacccatttcttacaccatatacaaaaatcagctcaagatgaattaagaacttaaatataaaacctaaaactttaaaaaccctgggagaaaacctaggaaatgccattctggacacagggtatggcaaagatttcattaagaagatgccataagcaattgcaacaaaaacaaaaattgacacatgggacctagttaaactaatgagcatctacacagcaaaagaagtgatcaacagagtaaacagacagcctacagtatgggagaaaatatttgtaaactgtgcatcctacaaatgtctaatatccagaatctatgaggaactttgacaaaacaacaagtaaaaaacaaccacattaaaaagtaggcaaaataaatgaacatgcactttttaaaagaagacatacaagcagtcaacaatcacatgaaaaattgttcaacatcactgattacagagaaatgcaaatcaaagccacaatgtgataccatctcacaccagtcagaatggctattagtaaaaagtcaaaaatagcagaagctggtaaggttgtggagaaaagtaaacgcttatacactgctggtgggaaggtaaattagttcagccaccgtggaaagcagtgtggagatttctcacagaattcaaagcaggattaccattcgacccaacaatcccatttttgggtatataccagaaggaatataaatttttctaccacaaagacatgcacatgtatgttaattgcagcactgttcacagtagcaaagacaaggaaacaacctaaatgcccatcaacggtagaatggataaaaaaaatgtggtgcatattcaccacagaatactatgcagccataaaaagaatgagatcatgttctttgcaacaacatggagagagctggaggccattatcctaagtgactaatacaagaacagaaaaccaaataccacacgttctcacttataagtggaagctaaatattgagtacgtgtgtacacaaagaagggaacaacagacatcaaggcctatgtgagggtggagaaagggaggagggtgagaatcagaatacccaacttcaaaccatactacaaggctacaataaccaaaacagcgtggtactggtacaaaaacagacacatagaccaacagaacagaatagagaaccagaaataatgcttcactcctacaactatctgatgctcaacaaagttgacaaaaacaagcaatggggaaaggactcccgatgtttattacctggctggaaaaatcatctgtatacaaaacccctgtgacatgcaatttacctatgtaacaaatatgcacatgtacccctgaacctaaactaaaagtaaaaaaaaaaggaaatctaaagagaaaaaagtgtttaagaactatgttttaaaatatatcactttaaaaatttaaaatttaattaaaaagaaaatagtaccagaacaatatgttttaacccataaaccattgccaaaaacaccaaaaaactagtattagctaaatatatctctttgaactgtattggaaagttctgtagaaagaaaaaaggaattgacatatttttatttatacggaaattttatagcatttaaaattcataaatttataatttatgtataaataatatataaaataatatatagtatatataattatatattatatgttatactatatgttataaatagtatatataattatactatttataatactattatagtactattatactattatagtactattataatactattatagtactattataatatatagtacaatatataatatactattatatattatatataatatactattatatattatatataatatattatttaaatataaaatataaataacatcaatataaaatttctacataatgctatataaataaatcatgtaatttagatagcattatatataactatatagcatataatttttattataaatactttatgaatagtaaatcatttaatgctcacaaccatgtgagttagacactgttattgttcacattttataagtgtgctcaaggtgaaatggtaaagtcaagatttgaaaatggacattttctctaaagtctttacttttaacctctgtgtcacgctgcttcccaacacagtaaataaataaacctccatattcctgatctaaagtatttttattgtttttcatatgtccgcagaacatttatagagactgatcaggtacctgactacaaagaaaacttgagcaaattcagagtaatgattttatagttaacattatctgatcataattcaataaataagaaaaaattatcaaaaggtaacaaaaagttgactacttgaaaatttaaaaatacttagaaaataattggttccaaaagttgaaagggaaattattgaccatcttaaaagccatgaaaggtcgaactttataacatactctaggattctgtgaaaactatatatgaaaaattttgtagttaaaatgctgcggtggctcaagcctgtaatcccagcactttgggaggccgaggtgggcggatcacgaggtcaggagatcgagaccatcctggctaacacggtgaaaccctgtctctactaaaaatacaaaaaaattagccgggcgtggtggtgggcacctgtagtcccagctgctcgcgaggctgaggcaggagaatggcgtgaacccgggaggcagagcctgcagtgagccgagatcgcaccactgtactccagcctgggcgacagagcaagactcccgtctcaaagaggaaaaaaaaaaaaaaaaaagaaataaaccaaatcttcattctaagaaattagaagaagaataaagagagataaataaaggcaaaagcttaaattactgaaatagaaggcaaaataagtaataggatatataaataaatttaaacttgttatataaaaacatctaaactctatacatgtctataacaagtttgatttttaaaaatgaggaaatgcaaaattataaaagatcagaaagcagaaagaagactatagtgactgaaagtattacaagagaatacgatatgaaacttgatggtagcaaattttaaaactggaataaacattggggaaaaaagaggtaaaactgtctatttttgcaaatgatatgattgtaaacctagaaaacccaaaggaatctaataaaagtcttctagaattaagaatagaatttgataaaataggtggatctacaaacaggcaaaaataccattagcttttttgtactctaggaataagaaaaggaatgaaaaaaaaagtctaaaatagtgaaaaaccaacctctatgaaatacttaggataaccaaaaaagaaaatgcacaacaaagttatactaaaatatgcaaaaggagaaatgaagaaatggaaagatgtgccattttcttggataggaaaattcaatgccataaagatattaaattctacaaattgattatgtgtgtggtgtgttttactaaaaatcacaacaaagtgggtatttcgggtttgtttgttgtttttggtaattggataaagtgatcttaaagtttctagagaaaaataaatatcaaagaaaatacaagtaatttagaaaaaataagtagagatggagtaagggacatcctcgctagttactagaactgtctataaacccatcgtattaggttggggcaaaagtaattgtggtttttaccactaaaattgcaaaactgcaattacttttgcaccaacctaatcttcaaatcagtgtcctactggatctcaattttattgcacactcaaggatacgctacaaatatatgaatgaaaaatataaaaggtaaagtaaaccaaagctcttaccaagaaatctagtggattatatgtactgttatataatgggggtaggacaaaccctcccaataaaaactgagaagccaaaagctctgagagtaaagatagctgtatttgactgaaaacagtataacttttcaggcagagataatataaaaatgcagtagaccatggtagatttgaagaaatctatatagtgtgaacactagttatcatttttataatatgcaaagatttgttatgatttggcaagaaaaacaagaacaaaccaataggaaaatggacaaaagatatgaatgggcaatatacagaaaagcacatacgaagggttgagaaactcggaaatatcctcaaatttaccaaaagtgaggggagtacaaattgaacaaacaataagatatgactttatacccaccagattgtctaaaattgtaaagatttgtaacacttattgctggcaggttagtaggtaagggagaactttcatacagcttaggtagaatggaaatacctcttgcaggagcagcatggcactatctattacaatttaaaatacagacagtctttaggccagcaattccttcctcagactctaatagaagcaaagccaccagaatataaagattcatacacaaggtgttttagcttgcttcctttactttgttttgtttttgcaaattagaaaagctaagtgttttctgtaatggaggatagctgaataaattatggcatatccatatgatggaaaaatacagtcattaagaataaattaacgcttgtaatcccagcactttgggaggctgaggcaggagaattgcttgagcctaggagttcaaaactggcctgggcaatatagcgagaccctgtctctacaaaaaaatacaaaaatcagctgggtatggtatgccagctaatttttgtattttttttttttgtagagatggggtctcgctatattgggtatggcagtgctagtctgtactcctagctactcaggaggctgagctgggaggattgcctgagtccaggagtttgaggctgcagtgatctgtggtcgtatcactgcactccagcctggttgacagagtgagaccccatttcaaaaaaataaaaaagaagaaattagttgtgctagttgacaggaagaattttaaaggatatcgttgaatgagtaaagcacaatgcagtgaaaagtatatgctatggttttatttttgtaaaacaaaagcccctgtgtgtgtatgtgcatgtgtatgtctacctacgattatatagccatgagtaaaaataggaaagacacatactagattattaatatgggctttctgggtaagtgggtgggtggagaatttatatgtgtggaagagaagaggaagcaccaagccaaaaaaggaaaaggaataaaaagaccccctacacataactgtacacatgaacatatgtttaaattgatcccatgcatgcatttatgaaaatatatgaatgtgtgtttccatacatgaagaaatcaccttgccagtttgagggtttctgtttcacagataacctcctgctttccaggaattttttttttttaactttgaagttcaggggtacctgtgcaggatgtgcagtttcattacatagtaaacatgtgtcatggggtttagttgtacagattatttcaacacccaggtattaagcctagtatccatatttgttatttttcctgatcctctccgtcctccaccccccaccgtccagtaagccccagtgtgcattgttccaatgcggtatttggttttctgttcctgtgttaccttgctaaggataatggcctccagctccacccatattcccacaaaagacatgatctaattctttttcatggctgcatagtattccatggcatatatatgccacattttctttatccagtctatgattgatgggtatttaggttgattccatgtctttgctattgtgaatagcactgcactgaatatatgggtgtatgtgtctttataatagaatgatttatattcctttgggtatatacccagtaatgggattgctgggtttaatggtatttctgtctctaggtctttgagcaatcgccacactgtcttccacaatggttgaactaatttacattcccaccaatggggtgtaaaagcattcctttttctccacaacctcaccagcatctgttattttttgacggcccttttttgataatagccgttctgactggtgtgagatggtatcttattgtggttttgatttgcatttctctaatgatcagtgatgatgagcttcttttcatacgattgttggctgcatgcatgtcttcttttgagaagtgtctgttcatgtcctttgctcactttttaatggggttgttttatgtttgttgatttaagtccattgtagatgctttttcaggaaagtttgctgttccatttgccaccctgtccctacatattctccaggaaagaattactgactctggggcttccagatttacttccagaactactgactctggggcttattctaagacttcccctcccatgacacaccatttcatctcacaaacagcactcagaaagcctccaagattcttctggaaatggatatccctttgggatctctacctctatcccttctcatccatacttcctttagtgaagtgacccccacactaacctttctaggcaaagcaaattggcctgttaggcagattttctaggggtgtcaggttcctctgcacccacactagaaaagccagaaggtgaagagttccatcacaggtacccaggaaaatgaccaattgctcttaaggtcataggtcttagaattttagacttgcctaagttgtgaaattctttagggtctaataaaagtaataagcagccaagaatgctaatttgagatacctttggtcagcctacgctgtttatggctcacgagttcatctcctccttgatgtcaactgaatgcttgctagttttacattccatgctcacatctgtctgcttccttcagcctcctggtcatggagcaatttccttcacttcaaaggaggctccaggtgcagggaggactccagaggtgtggcctgacctcagaatctggctcccttttattttactaaaacatgtattctcttcatcttatcccaagttgacttttggagctattccgaaatttgttcatctttgaacaccgagaatgagaataaaatatatttttccttttccttcaaaacattgaccctagttttgtcatgatgcttcaaatgaattaattgctgaaagaaacagtagagataattacacatgccccacaggagaaaaatgccacgattgaaacagtagaaaacaggctgtgggagatttagtgtaataatggcctctgataaatcatggagaagcaagaagtcgttgttgtaagccattcgcttttagggtggtttcttatgcagcagtagttggcgaatgctgtgtgtaactccttcagcaaggtgaggctgcttctcccaacaggaggcagggagtatttcttactcccgtgaatctacctgggctggctttggggcactgtgggggttccagagcctaggtattcaagaggcttcgcagcttccacccttgccctcttggaagcttgaaactgccatgctgtagagaagcttagcctagctccctcgtgtatgagaggcttaaggaagaagactgaggctctagccaatcgccagagccaactcccagacatgagtgaggcaattctgtacattctagctaaaggcagctgaatgaaaacccatagaggaagagcttagccaacccacagaattgtgaacaataataaaggttgttgttttaaggtattgagttttgaagtggttggtaatacaaccatgccttattaatacagagccttggatttttttttactaccttaacataaaattatttattcatttatttttagatttaaaaaatttttagtgggcatatagtaggtgcatatatttatggggtacatgagatgttttgatacaggcatgcaatgcgtaataatcttatcatggagaatggggtatccatcccctcaagcatttatcctttttattataaacaatccaatcatactattctagttattttaaaatgtacaattattattgactacagtcaccctgttgtgctatcaaatagcaggtcttactaattctttctaactattttttgtattcatttgccctccctgctcctcaccacccccgtccttccaagactcttgtaaccatccttctgctctctgtgttcatgagttcaattgttttgatttttagatcccacaaataagtgagaacatgtgatgtttgcgtttctgtgggcttggatattttaattcagtatctatcttttttctagttttctatatatattgagacatcttttttactttttttcttagaaacctagatagacaccttccctacatagacacaaataactcctatataccatacacttaaaagctcataggagacaaaagtgcaaaggcaggcactgcatctaatttctactcttcagtgtcctgcgcctgggtcagcagcacatgattggtgggaagtcagcatatgttgaccagattatctcatgtgacacctgctgctgcttttatctcattttcttagtacttggatttgtcacagaatgaatggtctgattcatttggcctacctgggcagctttgcttgtgtccccttgttctctcacttttccacgtagatagttttcaagggtcccagcctggaggaagagaatatctttccagttgttggtggactgagcttattggtcaagagtgttgtagttgtagtaataatagtagtaacagcagcagcagtagcagcagctaatatttattgaaaccttatcaatatgccattcactttaattaattggttaatttagttaattagttattttgatttccataaaggaaatggaggcaacgatgggttacttgattctcccaagataacataggtaaatggcagagtctcatcttttagcaaacaccctggcttgaaatgtagctagctgtgtggttactgatgtttaaactaagaagtattaagcatagtcatttataaaagttccctgactataaatcacccataagctacaatcgtcaaagcttttaaatatcatttgtacttctcattagccaagaaacaagtattactgagtgtgtcatataagtctgtgcttgtgccagttactatagaaagttataaaacatataaactataatacaaaagcagcatataagaatcttggctctaaagggacttacactattttgaagagaccagacttacacagtaaaatgaccaaaaaataagacctagtacctagtctaataataataattaaaaaaagagagcaaaggagttttgagacctcaccttttgcagggaagaatctgagtcatatttcaaatctccttttcttcttctcagggcaaaaccacagctttcatttttgaaggtcacagcagtaaaagatggttcaataggccagactaacctgtgttagcaactaggataatatccagaaaagaaaatttactttgggatttaagatgatcaaaactgattacttctcaagaggcttagaaacccaaagctgtaaacacagctggggaaacacttgaatgtgcagccataaaaactccagtgaataatccatccttctgcttcatgacatggatactacaccacatacatgaatctataggaaagcagtaaatatttttatacaaccttgttggtgaagaggaaagaaaaatgtgtagaaacatgcccacccacatcatctatgtgtgcactgtaaatgtctctcttgttttgttgaagttaaggcaaaaggattacattcagtccagccactaaattgtaatacagagatgttattgactaaacctgtaacaactgggtttgtcttctcaagatttagagaaccaatagaattatttctgattggatgataagtaaatgctctattatttgttaaccaatagtcaatgacagaaattgagccagttttctccatatagaaaatttttgacttatcaagacctcttttttccctggaaagatagatatctatatattaacaattattttctctagtagtgtggttaggtgtttgattatttatttttcttattggtgtttttgaaatttttcaaaataacatctatagtttttataatcaaaagatactgtgatttttaaaagtgaacaacttagcttcttactgatagacagtcttacaccatttaaacaaattgcccttaactactttgcctaccaaataaatccttatctttggtttattttaaaggaatttttcctttcagcagagttttatgatcagctttcactgatatctagaaatacatgtcaaggttaagaatgttatgatgcaggacttgagccttgggaaaagagtattctaaagaggacaaaaattatgccttaaaaattcctttttcagatgacttgctgtgtagtccattaggcagagacacaaaaagtactttctaaaataataatggcccagaaccttgctctttgagataacaaagctctgtttttgcaggtggctttctactcaaagaacaaaaactggaaatatccattgaattggcctgtttacttgtgctgagtcttgctaatagaacagagctaatcaagccctgggtacagagccctgtatgtaaaggaaaacacccatctcactaaccctcggatgtgcacacttttcatgttctttacaaagacactcaccctgttggggagggccttgaaggcagtgctggccaataggatgacaatgcaagccacatacagaggtttaaattttccagtagccacatttgaaaagcaaaaatcaacaaatcagttcattttaatactgtattttagctaactaaatatatctaaaatactgtcatttcaatattaaacatgtattcacatatttatgtcccttttaaaaaaaatttggtctgatttccagggtgtgttttacctgcacagcacagctccttttgttttttttatatgtatacatattttttatttttgtagatacagggtcttgctatgttacgcagggtggtctctaactcctgggctcaagtgatcctcctgcctcagctcccaaagtgctgggattacaggtgtgagccactgcactcgacctcactttagtcacatttcaagagctcaagagccacatgtggctagtggctaccttatcagatagtgtaactctaaaatgaaaatgttagcaccaccaaataacattagatggccttaattttttttacattgagatataatttatgtactgtaaaattcatgctttaaaacgtacactttagtggtttttagtttattcacaagactatactaaaatatatacaaacactatttcatttcagaacactttcattatcccccaaagaaatcccatacctttatcagtcataccccattccctcattcccttcttttcccagccctggcaatcactaacctgatttctgttttgtgaatttgcctattttggacatttcatataaatggaatcatgcaatatgtggcctttgtgtcagacttctttcttagcatcatattttcaagtttcatgcgtgttgggtcatgcttatccatgttagagaaaaaagtactgccttcctttttatggttgagtgacagtccattgtaagggtatacagcacatgttgtttagctgttcatcacttgatgagcctttgggttctctccaatttttggctactatgaacaatgcttctgatattcatgtgaaagttttcacaagaaccaatgttttcaattctactggacataaacttaggagtgaatgtgctgggttacatggtaattctatgtttaatttttcgatgaactgtcaaactgtttttccaaagtggttgcaccgttttacacacccagcagcaatgcatgaagtttctgttttctccacatccttgccagtgcttgttattatgtctctttttaattataaccatcccagtgggtgtggcaagtcagctggtgttcttactaattaagaacaaataaaaactgtgattacaaaaatgcaacagcagttttaatattcttatagatttaaaagattaagggttaaactcacatttgcctggtctgtttgtaacgaaacacattgtggcttttgttaaacaactgttttatcctgtctgtgccagcagcaagtgaggtgagttcctttactacaaataattaatattaatttgcagttactgggtgttttatctatctgtcatctgtctatttatctatctacctatctatctatctactctcaaaatgtggtcaccacacctgcagagtttgcatttctgatatgttcacaggttacaattttgcattatataattttgcattataacctgtgaacatattataaatgcaaactctcaagccctgacccagatgtagtgaattacaaatgctgggagtgggatccaccaatctgtgttttagcaagccctgcaggggattctaatgcaggctaacatttgagaaccactaatctagagcaaacatataatgtgaccaaagtttatggaaaaaactatgggtcagacacagtgttaggtgttgggtgcattcgggttgaggattcaaaactaaaagacatgactgaagactgtggaccagaagcagttgcttgatgggtacaacgtgcattgctccactgatggatgcactgaagtcccggatttcaccataatgcaatacatcagtgtagcagaattgcacttgtaccccatgaatatataaaaataaaaataataagaaaagaaaaattatattaaatgtatgaaggaaaaaaaagacatttctttcctcccagtgcttagagtccagtgcatttgatgagtgggtgaatcagtgttagctcacagtgcagcacgctctaaatcaaggtatgcatgtgttcgccactcagggaaggatgagaaagcttccctgcaaaaatgacttttgagcttccaataaacttagaaagccaatatcggtttaaagaaattcaattatagttgttactcctgttagtttcaaagagaatcccaatatgatagcatggctttcaaacattttattaactggcttttgctgaggttcccaccttcacctcccagggagcattactcagagtgtggtgcacagggcacggtgacatcacctgggagcttgttagtgcagcagaatttcagaggtcactcctgacctatggcatccacatttcaccaagatccccaggtgacttgtatgcatattcaagtttcagaagacctcccctagctgcagtgaaggaattgcagttctctaagtcaaattatattccctgtgcagtgccctctgcctgggatgccctctgggaccccagagaagttggatgtcccttttcggcatcacgctcactgtggggttctagttgcctgtgcatcttcagtactagaaagtgagcatctccaggacagggagactgttttatttttctctgtaatttgcaggattcaaaacctacttgctgccttgcatataatgggtgctcggtcaatgttcatttaatgaaacaatggatggatgaatgagatgtgccaaatacccagtgtggacactgcctctgcagtgaattgtacctaaggatttacagtccactctgtcgcactcatataactccagtcagttgtctggtttgctagagttagacagaatcagacaatcagacagaaatttaaggtatgaagagactgggaagtggctatgggtcaaaatctagtttctacttttgaaacgtttatattatggtttctcattatgttttggcttctcagaccccacctcaaatgatagaggcagggacatgaaatgggcaccgatttgagagttggattctaagtctggtgccagccagtggtaaattgctttggacctttcatttcacccccaccggatttgttgcctcattaataagtgaagaagttgtaataggcaatcctgtaggtctcccccactacccaccccaccacctgccaataggtttttttaagcacaaacaattctcatatacattggtgcagaggcccctttggaaattaaggttttatttaaaaaggactttgaaggttaataagcaattttcttgacattttttataggcaagttacactaagttatatgcttctcttatttccctagatatttttaaaaacatgatttatcatatatttagtgtttcctaagaaggaaactgttgaatggaatctgctttggaaagatgtacgtatgtcatatgccaggaaaagtggattttgattaagaaatttggcatttgcaataaatccaactttgttctgagtgattaagttctttagaaaacctattgacttttcaaagtgcgtggattagaaatactgacaattttcaaaccactagccttgcattttaatgtcccggtgtcgcaggagtgaacagtaaacctctgttgccacacactgggccactcagcacacatgaagtgtgtcaacctgattggcgtggcgagaccacagctccccttgttccctccctcactctctcaccccagggctagcaatggaccattatctccaattttgacatctgaagagaaaatctggatgccaggaaggaagtttttccaaattggtataaaaaacgccaaatcctcttattacaacaggatacagtaaatataacaaaggaggaagttcatgagattgaaaaggtttaaaagtgtaaatgaaaaatacttctgagaaaaacaagatagccctaacacagtgcagttgcttgtgtttattgggaaaacactcactgctggaaagatgagaataagagagggaggctgacccatgtgttaccagaaagattgcacatcattgtctgccacaggacttggaaatctgacctatgtaactggaagccaatagcattttctttcacaatattatttctcttagaagtaaaatattattcttctggaggagagttttaatgagtgaatacagttgcacaagaaaggtggaaacagtttgtcttttacattagccagagattagggaaaatgagtcataaagagctttaataacttaacttagcttggggctggaagagatttcaaaatggtgggctgatgtcatcactcaggattcatgatcctggactgatcacttgaatacattgcacggctggactatatgtgggctaacatcttcttagttgtacctgaggatgagagcgtttgcgttgagagcaattctttttttttttttttaggatggagtctcactctgtcgcccaggctggagtacagtggcatgatcttggctcactgcaacctcctcctcccaggctcaagtgatcctcccacctcagtttaccaagtagctgggacccacctcagcttcccaagtagctgggaccacaggtggatgctaccatgcctggctaatttttttgtattttttggtagagacaggatttcaccatgttgccaggctggtcttgaacacatgagctcaggtgatccacctgccttggcctctcaaagtgttgggattacaggtgtgagccaccatgcctggactcaagaacaattctgatgcaaaccataagttcttcacagatttttgttaagagtattgtgatttagtggtagcaagagtgttatgatggtataaaatgtaattttagccaatcaaattctcaatttgaagttatatggctatgttttatttttgttaaaaccaccgagaatttataactatcaagagatttatatgtagtcctcatataaccctcacactagcaacttgattaggtaggtctattattgctgctattttatagaagaggaaattgaagcctagaacaattaaatagcttgcccaaggttgcacagtaaatgagtagcaaagctggaagttaaacccaggtctgtctgcacctgagctcaagttctaggtttcgaacctcttttagcttgaatacaaacttgcatcaaaagatctgtataagggtagttattcctcaaaagaatataggtttttgtgatgctgggttttcatgtaacccaagctcttaactccatccttttgcttgcctctcagagctgggccctccatgactccttttcttgagctctttccgtctgtcctccttacttgtttcctctactcatcacctacatgcataggctttctttatttagagtaactctttacatgactcttttatacctttccaatcattagcctatttctctcttatgtgatttggctgtgtccccacccaaatctcaccttgaattgcagctcccataattcccacatgtagtggaagggatctggtgggagataattggatcatgggggcaatttcccccatactgttctagtggttgtgaaaaagtctcatgagatctgatggttttataaggggaaacccctttcacttggttcttatcctctctcttgcctgccaccatgtaagacatgtctttcgccatctgccatgattgtgagtcctccccagccacatgcaactgtgagtccattaaacctctttttctttataaattacccagtctcaggtgtgtctttatcagcagcatgaaaatggactaatacatctccttttcacaaaaaatagtctctttggtgcaacttcatggccctcactgcctaccctcccaccatgctgaaattatgctctcctagggttctcagaatctacaaccaccaaacccaaggcctttccctgggggtctttcaccttgacctttctgcagcatttggtcctgcaggccatctacctcctggagcactgcacgtgcacagtaggcacacaaaaatttattcaatgattaattaactaaaatatccaaacattttctggattcttcaatagaatgtatttatttaagattccagaatttttttacatgtaagcatcctcatacattttaaaagaattcattagaaaatgatttcagttaaggaaatgctcaacattgcaacaataatcctcttttacagagtaaagaataaattcaattgttttaaaaagatttatatatttgtgatagatatttttaaaacttgtaggcacattgtacatacagattaacttgaaagggatcattgacctaaatgtaagagcaaaagctgtgaaactcttgggaaaaaacataagagtaaatctttgtgaccttggattaggcaacggtttctcagctatgacacgaaaagcacaaacagaagaaaaaataaattggttttcatcacaattaaatatttttgagcctccaaggacactatcaataaaataaaaagacaaaccatggaatgtgagaacatatttgcaaatcaatatcagatgagggacttatgttcacaatatatacagaactcttgtaactcaacaataaaaagacaagccagttaaaaaataagcaaaggatttgaatagatattaatccaaagaaagtgcacaaagggtcaataagcacatgaaaagatgttcaacatcattaataatttgggaaatgtagattaaaacctaaatgaggctaggtgtggtggctcacacctgtaatcccagcactttgggaggccaaagcagaaggattgcttgggcccaggaatttgacaccaaactgggcaacatagtgacaccctgtctctacaaaataaaaaaataaaaaataaaaatagctgggtgtgatggcatgcacttgtggtcccagaaacttgggaggctgaggctggaggattgcttgagcatgagaggttgaggctgtagtaagccacgactgcatcactgcactccagcctaggtaacagagcaaggtcctgtctcaaaatgttagttaccatatgacccagcaattccaccccgtgtgtgtgtgtgtgtgtgtgtgtgtgtgtgtgtgtgtatccaagaaaactgaaaatacatgtctacacatgtgtacacaagatgtgtacacaaacattcatagcaacattcttcacaataggcaagaaatggaaatagcccaaatttccaccaactggtgaatgaataaataaaatgttgaatattcatgtaacagaatgttattcaccaataaaaaggaatgaatattgacatatgttgcgacatggatgaacctggagactattatgctaagtgaaagaagtctgacacaaaaggccacatgtcacatgattccatttaaaagaaatgtccagaataggaaaatctatgcagatagaaaatatgttcgttttcaaggactgagcagaggtggggtgggaatagaaaaagatcacaaattggtccagagtttctttttggggtcataaaaatgttctgaaatttaatggtggtgatggttgcataaccctcatataataaatatactacaaaacaatgaattgtacactttaaaagggtaaattttaggtatgtgaattataactcaataaagctcttttaaaaagtagaaattagctctctgcaacctagtgttcatttcctcatttgttcatttaccaagtctttgttgagcatgcattgagcaagggactatgctagtgttaggcataacagcattttgaaaagatcacctggcttcagtgtagagaacagcttagcagggcatcagaagccttatgaatgctgacaaaattgggagctagccaatacagaaagttacatctcttctcattcaaaagttatttctttacgttgctctttttgccataaataggcaaaccaaaaaaaagaaggaaatgagctcttcttcagctcttttgtgatccaaggaaagctccagggtttcttaagggtttcagaaaagagcttataatcataaaaaccaaattcttgagtattaagtttacttttgaaatctaataaaaaccacaccatgcacccatctgtgccaacagtctgaaatggaaattgaagctagaagcattgctgtttagcctgggaagcctgggaagactgaacctttactcatcatacacctttgacaaaatgtattataaagattggccggggatcccagtttggtttggttggacaggagtggggtgtgggagcactgcacgcttctgcaggagttcctcttgtcctctgcagcttcctttgccccaggtacacttactgggttttcacagaacatttcaagctttgtagccagccttggtctcacaggataatggtggtttcagggagaaggaaagcgtagctggcttaatgagtcttccctagattgtatgatgggaacagagtttagagtttttgatgaccttggaggttccctgttcacttaatctcttttcacggcctttgaaggtacagggtggtcctcagtatgtgtttatcttccttcccaatgtaaactactcattaacatttgtaagaaaagcgcagtcaagtgttggtaaactgattctaacagggttgagcaatcttgaaagtttaattcccttccaaataacttgggttgactctcacattatttcaatgagaattcctactaatggtgagctcttatgttgaaagtaactcaaccacagatcaacaaaacaagattttctgctctgaattgatgccccctaactctaataaagtgaatcctgtcaaatgaaagaaaagaaaattcaaattagaaaaataatttttaaataaatgcacagaggtgagtaatttttctcctttgcatgtgcttagagataggccagtcttgagtcagcacacctctgaggatggatgccatatctgttcagatttaactaacacagcacattgaatcagcacctgctaaccctctattgactttactgctcctaaaagacggtctagaagtgcttgagttagagcagaaaccctcctcattagccagttctccttctgcatgcccctttgggagatttgaagatgagggtttcaatgggatgaatgttaagctctgggtcaagtgggccctggatttacatcattctgacttcacaagtctctgaggaaaaaagtgcatttaggaaagaaccaaaggaggaaatcatggatatcggtttacaacactccaacttgaaggcatttttctttagtgcctcttcaaattttcaagtgggagtgaaaattaaatccactaaacaccaaatcatctggagaatttctactgggcagagttttgcagcagacatttggttggaagggtagaggcaggtaagactcttcttgaaaataatcatcaggagaaacagacaacccacagaataggagaaaatatatgcaaactatgcatccaacaaagtattagtattcagaatctacaaggaacttaaacatattagcaatacaaaacaatcccatcaaaaagtaggcaaatggcatgaatagacatttctcaaaaaaagttatacaaatagccaagaaacatggaaaaatgttcaacatcactaatcatcagagaaatgcaaattaaaaccatgatgagacaccatattactcctgcaagaatgaccattattaagaggtcaaaaaaacagtagaagcattgtggatgtgacaaaaggggaatgctggctggaatgtaaagcacaacctctatagaaaacagtatggtgattccttaaataacaaaaagtagatctaccatttgacgcagcagtcccactgttgggtacctacccaaaggaaaagaagtcattatgtgaaaaagacacatgcacttgtatgtttacagcagcacaattcacaattgcagagatatggaaccaacctaagtgcccattgaccaatgagtggatttaaaaaccgtggtacaagtataccctgaaatactactcagccataaaaagaaatgaaataatgtcttttacaatgacttggacgaagcaggaggccatttttctaagtaaagtaactcaggaatggaaaaccagatactgcatgttctcacttataagttggagctaagctatggatacacaagggcatacagagcgagataatggactatggaggctcagaagggaaagggtgagaggtggatatgagattcaaaactacacattaggtacaatatacactacctgggtgatgggtgcactaaaatatcagaatttatcactacataattaatccatgtaaccataaaccacttgtacccccaaagctattgaaataaatgtgaaaaacagaccacaaacaaaaagtctcttcttgagacactgtccacggcaaatatacaggtttagaatgtttgtctggattgattagggggctaccgaaatagaggggtggctaaaggtccctcctccctgtctccagccacccctgggtgcatccaggaactggaaactgtccccagcagaaaccagaataatggctgcaaggccccaaccaccaagaaacagaccaggtttaggctgactctggcaaagaggcagacttgcagtgctaagagctcaccctggatctttctgtccttgctttggcccattcttttcaaaatgtcccaggccctgccaaagcttgggttcatcccaggacctggagagaaagtatgttgtaaaagatgcagtctgccttccaaatggcttgtctgcaccacaaactgcagccctgcccaaagctgctcgaaaccagtggcaaagccatttggccatggatgaagcaacagagttgaatgggaggtaagggacaggctcagacctggaggatgggaaaaaagacactcctgctctgtgtttgttcaatttttagggtaatcagaggtggtagggtggatggactgcagctcttcccagctgatgtcacctggaaaatgtggaggccaacacccctgacttggatagagcccttctgtttggttttatttttaaaaaatattgcaggtacgccttggtttgatttttaaaatgagtgatgctgctttatcctctatatgtatgcacaataaagacaacaatacatcaattcttctcattcctccaaaacactgttccattgaaaagccaaaatctccaccttgtacctatactaatattttctactaagttttactggtccagcaaaaaagaagacacttaatcatgttgaaaacatgagtattttcccatgaaaatagtttcttcattaaaaaaaggtggggggggcatgcgggtgggaataacaaccatgtaagttttccctttaccctgtgctagagagtattccaggagctcctgcttaaaacagggactttcaaattaacagcaagtcattaaaatgttttgttactcagaattgggtatttatacagtcgagcctattatttgtggatttcatagttatgaatttagctacttgctaaaatttttttgtaacccccagatcaggattcacggtgttttcacagtcatttgtggacatactcagagcagcaaaaattggagtgaaaggacacacacattaccagcagagttcagacaaggtgaccttcttgtttcagccctcatactggatgtaagtgtcctttttgctgtctactagtgccacttttttcttatttttgtgctttttcttggtgattttgctgtttaaaatggccccaagcatggtgctgaagtgccgcctggtgttcctaagtgcaagaaggctgtgatgtagcttccagagaaaatacatgcattacagaaacttccttcaggcacgcatcacagtgctattggctatgagtttgatgttagtgaaccaacaacatatattagatgcggtgtatttaaataggaacacatataaaacagcttatgtattgattggctgataaaaatgttgtcaccagaggatcataggaagctaacgtggtagttcctctaggagcaatgattcagaatttgctaattcagtgtttgcagtgattttaaagaactaagttacctcaaatatcaagaaacaattgcatcagcttttagaatttgggaaggggaactaggatagggcatgggaaccatccaccagggtggatcagggcttacctggttgcagaggtcaacctgggcaagccggtcaggtaaaccaacaggggaaatgagccagaaccttgcagtaagtgctcctgggccaaaagtacagttctatggaccgctgggtcaatatagagaagtgtgtgtgagggatagaggaggaggaagtcgcccatggagttaagggatgcagctacttggagacagttttagtacccagggggagacagtttgtcttccccactacctggtgagagtgaaggatcgggagtggggtgggataatgcaggagcctggactctttggactgagtaaattaattctgggcttaatttcaggtacaacgaaacacccttttccacccactatttctggcagaagaagggaacttccctgtgggccttcagcagaaagagacctgctaaagaagacctgaagaaacaaatgattcctgaaaatctagttccactttacatttgataggaaatgtgaccaagttggctgttccttgcctattatccatagaggcctcttttcctcttcctaggacactgatcccaatataattccaaatctccctaacttgatatgcctccccatggcatagtttaaaaaatcctcaagccagtggtttttcatgttggctacacattacaagtatccgagagacttaagaagtccctgatgtcagaccacaacttaagaccatcgatcagaatttccagggtatgagacccaagcatggatatatttttttaatgccctaggtgattctaatatgtaggcccaaagtgactgaggaaggcttgtttcagtgattctcaaacctggctgcaaacagtcaccccagggacatgaaagaaatcccaagctaatcaattcagagtctctttggaggtggagcctgagcctttttttttttaagtccttgagaatccttgactcggtgtaattctatagttgttagatgtttgaaaattttaagtaaaatctgctgaagaaaagcaaagaaaggagagtggagaaagagttggggattaatgtatgaatgtggagaaggagcggccaaagctcctgggtccgctggttcttctaatccattgaatcttgacctggagtggagggaggtgggtcattgaagggagcagaatggtaccaagggcagacctagggctgcattatgaggagacctcccccagcatgaggtccactgcctgaggctggccgctgcggtggccaggtctttggaactgacatcagcacttagagtggggttttcagggaccaccaggacagtggtactttctcttctgggctcccatcctcccttttctctcacagtgggaagctgacagcagaatgtgcagtggctgctgttgccttgcccagactcccatctcctagcttctgagagtgtggctgctgatggcttatggctgcctcccttctcagacacctgccttctgctaaatagctgctcccttgagatgttaccccctacactcttgcttcagccaagagggtcagtcagacaatgatcgactgactagggtacaaaagtccagctcctttgcctcatggcaggatgaattctggggtgcaattcatgttccctgtcggatcaggctaaagctaggtagttgaggctgtatctttgcttggaattttccctgctctatcttgctgccctcctgctaagaacacttccctggtttgaaaaaacactggcttgaggatttttaaactatgccatggggaaccatatcaggttagggagatttggaattatattgggatctgtatcctaggaagaggaaaagaggcctctatggacaacagacaaggaacagcaacttggtcacatttcctatcaaatgtaaagtggaactagattttcaggaatcatttgtttctccaggtcttctttagtaggtttctttcttactcccctcctcctgattacacttcctcaagatatatcctatgtacaagaatccttttgtaggttctacttctagacaacctgtcctaagacaagacatcattagtgtgtgagtggtggggagttcggggtggaaagaacataaactttgggatcggaaatgtctgggttcagccccaacatcatcactttttagctgcttaaatccatcaagttatatggactctatgatcctctattgccctctctatataatgcaggatggccacacatcccttgcaaggatattgtgatgatcacattaaatttgatgagaaaatggatgtgaaaacctatggcacataacagggattcagtaatggcagcttcccttgcctgctggaacttggctaccacccccatccacgcatggttctgcactatcctctttggtcccccatgcacaataactttcttagtctctattctctttctcttctcctttttatatcttcctcatattattgcttcttcccaggatttcttcatctcattttttacagtgtttttcacttcttctggccatgataaactaagaaaaatgcatgacaatactcagaaatactgatccttgttccgtgggctatggccagggaagctgccatgagtttatcagtttttgccagctaggcagagttaggttgggttcatttttgtaaacaagactcagggggctggtttgtggcttttcctgaactagtgtttagccagggaaggctatgctattttcctcacgagatgaaaataaaggccattaaaaatggattaggctagtgtttgacatgagcgccctcatccatcttcctcctctgggccaagtggtggcccagaagagagctgattgccacagtcaggcactaagatgagagtttacagcctcagccacaaaccagctgtgggactttggggagattgcataaccttcttagggccgtgtttctgcatcaccagaaaagcccgacagtgaaatgtgtgccagctacttcacaaagggtctcctagagttcctaaaatatgatctggaaagcacccacacccagtgcagaagctgatggaaaacaatgcattttgttactaatattcttgttaataacactctgaaaccattgcaaatcagctcaatagggcaggaagtatgcgataaatcatgtactccataataatgctctacaatgaagaagacaggaaatctcaaagtcacacattagccttgtgcacccaataccacctgctcaattggatttttattgtaattatgattttcacaagcccagtggaatgggctgagataattaacatgtttttatctgtccagcttggctttttttttttttgagatggagtctctgtcacccaggctggagtacagtggcaggatctcagctcattgcaccctccacctcctaggttcaagcaattctcctgcctcagtctcccgagtagctgggactacaggtgcacgctgccagacctggctaactttttgtattttagtagagacggggtttcaccatgttggccaggctggtctcgaactcctgagctcaggcaatctgcccacctcagcctcccaaagtgctgggattacaggtgtgagccaccgcccccaggctcagctcggttttctattcttcttcttgcatgagtactccctttcctctgggagtaccatctctactggtggagctacaatcacagtggggaattggccaacctacttactacctctcatgcaggaagggtgggcacatgacccagcctcacagttgaatgtagtccatttctctctgatcacagggactgctccgaggggtggcggtttactaagtcaatcaggagtcttccctggcatgtttgtcctgggaagtagccctctctgtttttttttcttttttaattttttattattattatttttttaagagagacagggtctcactctgtcacccaggctggagtgcaatcatgggatcgtagctcactgcatgggcttaattgatcctcctgcctcagcttcccatgttgctgggactacaggtgcacactaccatatacagctaatttttagatttattttttgtacgcaagaagtctcactatgttgcccaggctggtctcaaacttctgggctcaagcaatcctcctgcctcagtcttccaaagtgctggaatagcacgcatgagccatggtgcccagcccctctctgcctttttgaaaacaagcagttcagataagcccccgctcccacacctcttatctttcttgtcacatggggtgaggatgggcagaatgataccattagactccaaagctgaatagtgcagaggccagatgtggagagagaaggaaagcactgacgttgtttgaactagatccccccttccggatgtgcctgttttgtgagccaacaaaattcctcttcctttaattaatttgaattagggttgtctcacgtaactcactacaaagtttaaaagaatcacattttgaaaatataaattttcatttagattgatgttctttttcctcaagtattttatactaatgaatatttataattagaatagaatgagtccatttggtattaatatattgcaattattttaatattattataaagaaaaataggactaatctgttattagctctgttttatgctttaatgtaaaaaatgtctattgggaagtaagggtatgatttgatcaattaaatcagtttaatgattctatgcaactcatgaaaaacaagccattttatatacaaaacaggaagaaacaaccaagagattgaaaaggacaaaatattagcctataatctcggcactcccaggttttaacctagtgcttttaatatcagagagactgtgcccagtaattcaagtttatgttttctcacatctgttttacaaatgaatacaaatatatgagagtacttcttgtcctaactgcagctgggaaggtatttcaagctgtaaatatttactaagtgtgcataaaatagcagtgtgggctgatacggccagtgatggggaattagaagcattaggctccacttctggcccctttgctaattcctgtgtgaccttgggcaggtcagttaaaatctctgtgttgcagtgctacatttacatgaaggagatgctgaactttattggtcggcactccaaaaataataactactgaggacaatgcctgcaattcagagtggaaatcaaagagggatctcagagactgcacatctattactccttttttttttttttttttttttttccttttcaggggagaaggagtggtggtgaaagagggatggatgcatgcttgcctcggtcgagcaaaaacaaaacttcattgtcttgaaaaaattagcatgcacctccttccacacatcactgtggtaagaagaacacaatgaggataaagtggccagggttgaaaagcccttcagagaagatcacaggagaaatgctggcagaggaactgtgaggcatctttgggactctggtgagacattcttgtccctcagagtagaaaaaggagggctctgaggcagaagggcttgagtgaccttaagcaaatcatttcaccttcaagtatcaggtccttgaaccataaaatggagatgataatgcccatattgtggtgtgtcaaaacagttatacaaaatgaccagcacatagaagcagcctgatagaccctgggtttctacccacttccatttattcacttactttgatagtaatttggcaataggacagcagataaagcagcctccacattttcctatcagggagcaaaccctcagctcccttttcatcttacacacccaattagctgattccatcctatgtccatatttagactccagtgaaatttcttggattcatattctccctttacatcaaaaagcaaacaaatgtgaacaaggatacagggtcatgttctgtagtttaaaacatctgtttggagtgaaggtgttatacacttatcttgtatgcagaccgcaggttccctccctccctccccaagaaagcaaaaatggcaactgagatgatgatttggatgacacagatggaagaatcttgggttatattaatagtttaggactgaattaccgcctcaattgtttcactctcctgttactgctaagagcatacagcatagacagaagcagtttgatgagaggaaacccaatttgcactggcaaaaaaaatctcataagtataagaggatcccaataattggaccaaaacacaacatcatgattgcagcatcatggtcaagaaaggactgccttggcccctaagaaacttgtgttttactttcttcacagctgtagttctcaaactcttggggatctctttccaatgacacaagattttatgacccactaaatgaatctctttgtaccaaccactgcttgaaaaaaatctaattagaatcataggggtccatggtgcagctcttatgatgttccttagtaatgtcaaaagtaaaagattcactgattctaggagtaagaaaatacagtcatgataataattccttaattccaaatgctttgcactacacctgtcatttcacatgttatttactttttcacaactctgtgaagttgtagcattgctcaatccccacgacactgtaaggtaggcttgtttcattactacagaatttcatcacttctaagatgccaaagggtagaatgtgcaaccttattttttgtgcccacccagaaagaaaacagaatactgccaattaatccacaacacaccatcaattacataaaccaaaacacagccagtttctgagatattaaaatgtaaaagaaggagtgtcttagaattaatgaaatatggactttcccttttgcagatgaggaaatttctgctgtgttaaagactaggctgctgacggagattagaccaccactcaaagtcgcaccttctaacttcaacccaatggactccacccaaccagacctagtgattttgaagttgatcttggaagcaagagagaaggctcccactgtgtattcttgaaactaccactttagaagaaatgatttatcactgatagatggcagccacgatggtggcattttaacaagaaacaacaaactagtttcagagggaaatatgaatgaccacttgcttcctgtcatcatgatatactgcattaatacaatataggtacagatcttgtcattgggcatattttgtgtctaattaatatgtttacatatatataacttttgattatttctctgacttggcttctctgctgggtttgcagtcatgagagatgaatggctggtaagttgacagcagaagaaatagacctttcgatactttaataatgcagaacagtcaattctagttagcaagactgtacaatataggtatagtcaattggtcaacccttattatttgcagattccatagttgtgaatttgcctccttgataaaattgaattgtaaccccaaactcaatgctcatggtgcttttgtggttatttgtgggcatgctcaaagcagcgaaactttaagtcatgggatgcacgtgttcccagctgaggtccaacagtgacgctctggcttcttgtgtcagctttcatactatcagcaagtgttctctttgcagactacttagtgccccgtttttcctcatttttgtgctcttcattggtgattttgctgtaaaaatggccccgaagcataatgctgaagtgctgccaaatgttcctaagctccagaaaactgtgatgtaccttacagaggaagtatctatgttagagaagcatcattcaggcatgagttatagcgctgttggccatgagctcaaaattggtgtattaaataaggtgccccagtcagaatggctattactaaaaagccaaaaacaacagatgttagcaaagttgcagagaaaaggggacacttatacactattggtgggaaggcaaattagttcagccactgtggaaagcagtttggagatttctcagagaacttgaaacagaactaacatttgacccagcaattccattacagatatatatccaaaagaaaacaaactgttctaccaaaaagacacatacttgcatgttcactgctgcactattcacaataacaaagacatggaaccaacctaggtgccaatcaatggtgattggataaagaaaatatggtacatatacaccatgaagtactatgcatccatgaaaaagaacaaaatcatgtcctttgcagcaacatgcatgcagctggaggccattcttctcattgaattatcacaggaacagaaaaccaaatactgcatgttctcacttgtaagtgggagctaaacattgggtgctcatggacataaagatggcaacaataggcactgggtactactacagcagggaggagtgagtgggggtaaggattgaaaaactattgggtgctatgctcagtacctgggtgacaggatcatttgtaccccaaacctaaaaaaaaattcttccttatatttatttaaaatctgcttcctaataaattttctttaattaaaaatgttaatatcccagaaaaaataaggcatcttgaaacagaaacgtacattaaacaaggttatttattgattggctgatgaaaatggtgcaaacaaaggctcacaggaacccaacttcattcttgctaagtagaatggactgttttggggtcctaaagtatcaaaagggctgtttcttctgtcgcccacttaccagctgttcatatctcatgactgcaaacacagtggagaagccaagtcagaggcataatcaagagttatttaggtcaggtgtagtggctcatgcctgtaatcccagcactttgggaggccgaggcgggtggatcacttgacgtcagggatttgagacctgcctgagcaacatggtgaaaccctgtctctactaaaaataaaaaaaattagccaggcatgttggcgcatgcctataatcccagctacttgggaggctgaggcacaaaaattgcttgaacccagaggcagaggttgcagtgagctgagactgcaccactgaacagcactccagcctgggcaacagagtgagactctgtctcaaaaaaaaataaaaataaaaaagaattatttatatacatataccaagtagacaaaagtatgcctgatgatctggaaggaaacagaaaaatagaatgacagtggtggtgggagtataggtttttaacattcttttgttcccatttccaattgttggcatttctttgtagatttacgtattaaaaacaagaacgactgtcaggaaggcgaggaagcactgcctaacagagcatggcagtggtggaaaagcagaccagggagcccacaaggagacaatgatagagaagtctttctttgggagagcatccttagctgtggaacaggccgagatgcttacagaggaaggatggacctctgtataagctctgtagccttctcagtaaaaagtaaacagaaaaaaatggggggagagaaggaatgaagaaagtgagtctatggccttagtgcttctctgcttaggatagagcactggcaagcatatgaaaacacatacatttcattgctaaaaataaagaatcaaaagtgcttttgtttaagccttgatgtgatattagcaataaagagccaccagttgcaggagaaccacaatacatccataacccccaaaatatattagtttaggggaattgttgtcaacagtaggaacaattaagactgtgttgttatagaaatactgtgcctagctggtttgcaaaagaaaactgcctctgatgacttaggtctggagggcctttgaaggcagtttctttcctgtgaccagtaactgatttttcacaaaattgtgcattgactatttctcacaagaggttttgaaaatgaagctgggtttcaggttcgactcacatgagctacttttatttggacagtctttgtttttctcagtctcgtcggcagtccttccggggccttcctcaatccctggccggggctgaggcctggccgttgtttgggatgaaaaggtattggaaggctggctgctaattggagcttgcacctgcagaccccagccttggaggcgactcggcacaggctactgctctatgtgtgtatgcttgtgtgtgtgcattttatttcctcaatgaacactggaatgtggcatggttttttggcctgggtatgctggaggagatccaagctgcttggccactttctctgttctggggaagggcggggtgggggggcacctcctttactctctaagaaggagggatttctagctatgcaaatatatccagtgcattctgatctaatctcttctggccccaagaggggacttacccagataagaggcgctcttcagagaaagtgagagggtgccacagcagggctttcacccaccaataagctgatgaatttttaatgagtttctcacacttcactctagtaacattatccaggcagtgctgaagaggaatggctacaacctctgtgctcagccaaagacgagagaaatggacaaaatacccaggtggacctaacgaccatgcctctgtttctccccaccccacaatacccaggggttcaacctaatgcacatatttaattttgtgcatctgatcaattttggcatacatatatgcccatgaaatcatcactgcaatcaaggaacaaattcattttctttctctttgtaatctctccctctcactccccattcaccaggtccccaggcaagtattgatctgctttctataactagactgcttgcacattccagaactccatataaatgaaatcaaacattgtgtattctttttggtgtctggcttacttcacttggtatgataatttcaggatttattcatattgtaggtatcaacagttcattcctttttttctgcttagtattgcattgtgtggacacagcacagtctgtttattcattcacctgttgatgggcatttgggttgtttccagtctgaggctattaccaagaaacctgccatgaaaccaagacaggaggattgcttgaggccaggagttagagaccagtctgggcaacatagtggagaactcatctctacaaaaaataaaaacatcagccaggtttggtggtacacgcctgtgatcccagctacttgggaggctaagatgggaggattgcttgagctcaaaaggttgaggctgcagtgagccatgatcacattactgcactccagcctgggcaatgcagagcaaaatcctatcttaaaaaaaaaaaaaaaaaaaaaaggtcaaagcaggcccagaccatttccactttttgaagttcttgggatattaaaaatgaaagaaggaatcccaaaatagacctataaaatatgctatatttaaaatgtatacatgcttttgaacatattaaaaattcaacatgtaggtaacactggaaatgatatcaggattttgaatttgaagctcaatgtggggcctaggacaaagggtctcctggccattgaccactttgtgatgggtcctgaggggccagcaccagctaggggcccttcccacataccctgtacactctaaagtcatatgtggcacggttattctttatatgcttggggtcaaatcaatgctacagagatagctctggaaagaaagagcattttctgggtgtacacagattttctgccagaactgggaaggccaatcacaaacactggccttttggagagatcccttgctctactcaccaaaatcagcaagcctgcggggtctgaggtttcctttgggttgactatagtcttggatgtctctgcttactttgagatcagaatggtgccatgaccatgagaggggtcgctccacttgaagaatccccagatccctcccagccatggcatggaagctcccaccctctgaggaccgttatggtcgcctgggtgtaactttagtctccttttgcctttgggtgtgtctagtgtaatggttctctgtgtggggtgattttgccctccagaggccacttaacattgactggagacatttttggttgttacaacttggggagtgctatgggcatttaataggttgagcctagggtgttgctgaacattctacaatgcacaaggcagctgcccacaataaagaattattcagtcccaaatgctagtattgttgagtcaagaaatcttggtcttttttttttcttttttaagacaggatcttgctctgttgcccaagctggagtgcaatggcacgatcatggctcactgcagcctcaaattcccaggctcaagcaatcttcccacctcagtctcctgggcagctgggaccacagacgcatgccaccatgccagctaatttttaagttttttgtagagacagggtctccctctgttgcccaggctgatctcaaactcccgggctcaagtgatcctcccaccttggccttccaaagtgctgggattacagggctgagacaccatcccggtcaagaaaccttggtctttatgatctaatcaggtgtcaagcagagtggacagagggtggctgatgtagtctgagaaaggggttctttgttcattaatccaagaaggctgtgatatagacacagagatagggtaacaaaattcaggggactgaagaactagctgcccaagacctctcgccctctctcttccctttctcctcattttccttctccctcctgttgagagctttggagtgtaacagacctgttttcaaacccaggtcctgctgcctggtaaccttgggcagcttgctaaagctctttgaacctcagtttcttcacctgaaacatggaaataacaataggacttttcagaattatgaaaattaaacaagagaagtcaaaccatgtaaaaagtttgttggggcctagcacatgggaagaattcagtaagtgacagtgattattattatttcatgaatggagcatgacctgacacaaagcaccttgccagctgtgttctctagccactcagccacagttggtgtacatttttattagtctacaaaattatttactctaaaagtcttattaataataatccctgctcctcaaaagcaaaaccccgtgggtagactgcacttactatgttttgtacttcattctagtgataaaaaaaagtaaatggaggtcaggaacggtggctcatgtctgtaatccatcctagcactttgggatggggaggtgagtgaatcacttgaggccaggagtttgagaccagcctggccagcatgatgaaactctgtctctactaaaaatacaaaaattagatggttatggtggcatgctcctgtagccctagctacttgggaggctgaggcacgaaaatcgcttgaacccaggaggtggagggttgcagtgagccgagatcacgccactgcactccagcctgggcaacagagtgagagtctatctcaaaacaaaacgaacaaacaaaaacaaaacaaacaaaaccccaaaacaagaaataaatgtaaagtgacttaagctagactgatgtattatatattgaagtatttatgtacctgtgttgacatatgctatatgttagtttgcagtccatgataagaaatttacacaatgaagtttatcagaaaacacaccactagctgggactctcatagcaaatacctgggaactcataggctgtcctattccaggagggagcgggattccatgtcaggtgacttggatagtgtcccaggttgggtaggttaccccagcaccagcagggcctccttgccagatggccaggcagagactgggaggttcctgctggagggagctcagagtatatctggaaggtcgttattaccaacccagagaaccagtttggtgaggttggctcaaagggcatatttagtcagagtaagggagagatgtggtaacagggaggaggaagtctgggtaaggattacaagtagcacagtcaaaatgcgcttctcagttttcaacagagtgagggagaagtagtaccttagccccagccctgagacctaactcctcaattcttgccaacagcaggagagtgagcccaggaaatctccagacagccaaaagatgatccaggtgataagggcacagccaggcagtgtccacgccaaaaaagaacagaaagtttggcttaactctatttttgcctgtgtttttctcctggggcaggagtgtaacctaaaaacactccgggatacacggtggcccttacacaaattaagaatccagaggaagggctcctttggcaagggaactctcgggaggctggagccatgacagagctccccaggaacattctagaagacaggctagatttcctggcctttggtcaccagcctggagtttggcagagccctcttgtgcagagggtgaatgaagatatttggtcattgccttccctgctgtgggctgttctcagcattaagttgtcagtgtgcactaccattggggttacccaatggggtctattccagaaaagggaaggtggatttgcctactcaagcccaaagagcaagggccactgaaattgccttctgagtaataggattggcagacattgaggcacgttgcaaagaactgttaattataatctttactttctctctaaccagctcagaaaagagctttatgggaggaatatagtttgaatgagaggcattctgttcattctcccaaatactctgtggattgagatcagcaggaacaaggggtctacactgcattatcttggcctctcacatgaccaccttccctgagtttagtttaggtgaagtatgccactagaaaaaaatatcaggcatgttggcatctgtagaacctgtgtctcaataaagatgttttgaatgaatatctgaaaccgtatgaaataccagactcctgggcatgcattggtgaggatattgattactatttcatactgattactatttcactcagagttttcttataaagctgatatactcaatttctactccaagtcagatgaggaaagcttggtacttataaaggaattgctttatttattcctttctgaaaaatgagaatgatgtaattggggatatttcccttttgctttggttgccaggaagctcagttgaatctgatgcccaactataccagtcatgaaggctcttatgacatccatacctggtttgtatttctattggtcttatcatcctattctcatatttcccttgttcttgatttaaattcttgtttatatttcccatgattttatggcagagctccaactctgagatgcctccaattgccaggcaggtattggtaaatgaccggagtggagtaatagggcatggtggggactgtggcaaatggagagagctcttccctggccactctgctaaactaacatggctcccccaccccattctcagtctctatcctctaactctgctttattcatatcctctaaccctgctgtattcatagcacttacaatttcctgtaattatcttacttatctgtctacttggttattatcagtctcacctctgctatattcccagcatccagaacagtgcctggcacagaattgtcacccaatctacattttttgctgagtgaatgaacaaatataggaccaacatggccagagtttcctatgttttaaaagaacttgaaatttgaatttttatatgaaatctcctgattgttagatgtttagtagctaatataaaaaattaaaaacactatgctggccagaaatgagccatgctaatgtggggccattgttctactttctattctccagttggagcaaccacagtttctttgtagaataaagtggtatataaataaatgaaaacagacatctgtttcacgttttacaaagcattgccacccactgttaatttttcactattatttcattattgttccaatttaacatgagtaaataaaccactcccacccctttgcccgggagttgaaatgaacctgtgtgtttagaagtggaggaagctgtaaaaggcaggaagtgtcccggcagccagagctggcctcctggccaggcattcaggaaagaggatggaaaggttctccatgctccattttttctctttttcctgtcccagcaccagaggttaggtggatgcttcatctgacagaggctgtgacctctaattcacatgcagcctcacactgggtctgtttctctaaattttgtgtgcagaactagactatctgtgtgcatgtttctgacaatcctttcacatacaacctttggctcacctgccacctgtcaagaactgcagtcctaaatgttttagtaatgtgcatacacaaacacacacacaatgaataattaagcataatgcagagtgtctcttttatttctgcatagtataatattaatcttatttgttttaggaagcaatctctctctctctttttctccctctctttttctataattgctagagttgtcagttctttgtgatttaacaatgtctcagccaatgatggagaatatgaccaatttctaaccaagagatatttttctgtatatatttattttctcagagaagaagtctgctattttcccaagaatcactggtccactttgctaagaaaaaaaagccaggattcattggcattttttacttatggtaaaatacacataacatgaaacttgccatcttaacaatttttaagagtacagttcagtagtgttaagtgcattcacattgttgcataaccatcaccaccatccatctctagatcttgcaaaactgaaactcgtcacccattaaacagtaactctccattctccctttccctcagcccccggcaactgccattcaactttctgtctctatgaatttgactactgtaagtaccgcatgtaagtggaattatatcgtatttgtccttctgaaactggctttatttcattcaatataacatcctcaagtttcaaccatgatgtggcatgtgccggaatttccttcctttttaaggctgaatttatcccattgtatgtgtatactacattttgttatccattcactggacacttgggttgcatgtacctttgggctattgtgaataatgctgccataaatatgggagtacaaatatatgtttgagtccctactttcaattcttttgggtatataccaagaaattgaattgctgggtcattgacaattctatttttcattttttggtgaaccaccataccatgttacacaatagctgtatcagtctacatttccatcaacagtgcacaagcattccaatttctccatggccttcacaacattggttattttggaattttttttaacttgatagtagccatgctaatgggtgggaggtggtatctcattgtggtttttgatttgctttttcctaaccattagtgatgaggatcttttcctgtgcttattagccatttatatatcttctttggagaaatgtccatgcaagtcatttgtccatttgaattgggttgttttttgttgttgttgaactgtaggggttctttacatattctggatattaaccccttctcagatagatgatttgccaatgttttctctcattctgtggcctgtctttttactctgttgtttgtgtcctttggtgcccagacattttttattttgatatatcattggcatttctgtgcttccacttttgtctcctctggctctaagggaggtggactgtgggggaaggagaactgcctcacagctccaacaatgggggctgaaaggccactggagaaaggccactaagtcctatggcaaatagactttcagaacagtttcaaaaactccctcagtcctgcccttccatccccctgaacacattcatggtgcagaattgctttagtgataattgaatttccctccagctttggggttgtcaggacaatcatgacaatcactattgccctgaaacccactgagtgtgtataatggccactcctaacagatcatggtgaatgaaaaaccaatagaagagaggaggtctccttagcatgcagggcaatgctgggacctttggaggctgaaacgataaaaaaattatggtgcctgtaacccaaaatatatcaaaagataagcaacagtaaggcataaaatgaatccaaaaggttctgattttactcaagataacaacttcagagtttcttttacaatgccaaaatctatttgtttaaatttctgtcttttaattaattcattatattttggggtgcttctgcttcaccagtgccctaacccctttttgatccacctactggaaaataacagctttgttattattgttttccatatgctatgcatttttgtgtacactatgtaaaagaatttaatttacatgtcaatcccacaaggcgactactattacaatctctagttttacagtgaaggaaaccaagacagagaatagtaacttgcagaagattcaacagctatagatcaacaaatcttaggtcacagaaccaggatttgaactccggaagtctggctccagagctcttgtcctgaagtctacaatccagcaccactggctcatctccacagcctgcacctgtctggacagctcctcctcttgcctctggccctgcactagccaccctgaggtagctcctgatattctctatcagttacagtatttcatccttcctgcacaccactccctttactccccttctagtcagtctttaccttgttaatctctgcccatttaggattccccttgggcatctcctctgtgcccacccagtctgggctaggtgccctccgatggcaggctgtgtagggtctcattgtacttggccacatggaattgaaatttattgcttgtctgcttcccacagtggactgggagttccttgagggtggtgactaaggttttaaatctctatgttccaccctagccaagcacctggaacctcgtaagcgctttgtatctgttgttgagtaaatgaataatggagaacctagacaaggacttgacagagaagaaaaaggagcagggactgcccaaatagtagttttcaccctggaaatgtttttactaccctgagcagagagtgagcagcccacatccatatagatgagcagaccgagtggaatagaatgaatggaatgagcctggcttcttcaggcctgatgctgaggacacgtgccctgcctgtatggaggagacagctttgtcccccatcaaagacagtgacaacacaggtacatacacaaatgcatagcgcgtgtcacagtccttaaatacattacatagggctgagcaaagtaggcacctgtgcggggtgtggaggacatacggtagctccagaattccaggagccagctcagggcagcccagaacaaagtgtcagggcctaagcagggtgcggagggcatctgcatgggcaggggacagtggtcatgatggcagttgatgacatttgggggactgagcaaataagcaaataatatattaaggataatgggagccggcttctgatgaatgtcagagaagggagttacaaatgtggaaagggagaaaactctgtggtgttggattggaattggaagtatgaatttatggttttctatacatatagattaacatagaaataaatagatacgtaaatagaggaggaagctgggattcaaaattagatctgtctagctcttttcaccgttctatactaccgccctacatatagggcctctgctgtgaaacctctgtccccttccgtgtccccccaagaacctcaaccctaactcacacagacttaaaggattccaccctcatggttccagagcatgcatcacacctcatgtcattagttgcacacaactaactcatgaggttttcattacactgagggtaggcctcctcttatctgtattccctgcatctcccttggagccaggcacatggtcatcacaatagttagtattaatatttattgtgcagttgttatgcaccaggaaagacttcacatgcataatctcatttacagctgaagacaacgctatgagggatgtattaccatcattctcattttacatattggcaaggtgaagttagaggtgttaactgaggtaccccaaaatgcagagctagtaggaagtagaaccaagaatcaagaacagacagtctaattcctcaggctatgctcctctcccctcggctctgccacatggacttggtgtaagcaaatgttcactcaacaaattcctcctgggggacttgtgtatctgaatgctctccctcaatccaagtccacactttatgttgagctcgtttgaagctcacctctttaggggagccccacccccatcctgctctgcactgcgtcagcattccttgggcaccggacttgcaccacgccctgacacatgaccagtcagtgttggagcagggaacatagtttatcgacatttgttgaagtgaattcaatgcccaggaatggaagtaaacaggaatacatgacaaggtggtatattgtacaggatactgtggctatctatttctggattttccaggagagttccaatttctaaaattccatcctctcatcagaacatttgtcagaatacgtggccaagaatgtactctggaattttgtttaaagagtagggtcaccattctactgaaaagagatgggaatggagacaggatgtgctgctggtcacccacaaccctacacacccgtgagcaggtcacagcttctctcaacctctttatccatgggtaaaactgcaatgcaacacctactcctactgtggaatgaaacaaagtctgtgtgtgaatgtgttttaaatgacgataaagaataatgtcacataaacccagttactgttagtgggaatacttacatttttactgacctgtctggcaagtcattttcatttgtgaaagtaaagaagcttttaatgaaggccactgcagaaaaaaatagggtataaagagcgcaaatgccctgaggcctttctagtgttttgaaaaagatacctagatatttccatcttttagactctcctcaatttgatgtgtgtgtgtgagagagagagagagagagagagagagagagagagagagagacagagaaagagataggggtgagagctggaggctgagtgggcagaggtgaagtttttttttaaattgtatgagattctacctggtggaggaaccgggccatcttacctttgctgtattgcggatcagttcccagctgtgtgacgtctcaggagatagtccgtttgagagctgagcttttctggcttagcagtagctcggaaaatttttctttctctttccagtgttcttcgtcccagctatgcatgaaaactgctccacctttgtacgtgcgggggttaacctgggcatcccctgccccttctgcaaggctttgagtagagcagatccataaaactgagagcagctatggggagcttcgagggagagtggtcccctgcagagcagcatgcattagcatcagtgacaaatctcttctggtttggatggggctgagacgcccctgaacttccttctgctcttgccaaaagccaaggtccttttgttcacctttagggttgccaagtcaggcctacctcgcccctagatgttgtttcctgcaggcaatgggaaaatgatcttggagccagagaagggaaatcaacaaggaaataaacacagggtcaccacaccttcaggccatcattaggtctggaacattatcatgctgggaccagctcctaaataggcaggggctactgactggacaggtcctataatccttggcatcttttatttttgaatatgtaaaggggcatgcaccaaaatctatatcaggcaaataagtacttctgacttgttccaataccttgccaaaactttcaaagattttctattggcagtattgctcataactgaacactggctaatgtttgtagacgaagaaaaagaatgagcaagtttgtggctgatactatttaagactcttaactctaaagatatagaattattgtttaaataaggatttcttctgctcattcttcagcatcaccatcatcatcatcgtcagtggctgcagcatctttgctaacatttattaagtgcttaccgtctaccaggttctgtagtaattacctgacctgcattattttatttaattctccacagaatcctataattatcactcccattatatagataaagaaactgagcattacagagactaagtcattcctgcaaagtgacccagctagttaaaaatgtaaacgttgcacttctggaagtgtgcttttctgagttttgcttttcccactggtttgcttaagcacttctgtgggctgacagctccagcaatggccaaagattttacttaaataagcgattagctctgggaatcagattctaagtggaaacatgaataattagtgaattaagtagtctctttccagagatgtgagtcgggtgctggatgttatcttatgtatatgcaacatgcaagaaagacacatagagtccaggtacttgtggctgcctaatcacaggtggtgccgctggctgcggtgccttcagctctccactgtgactctgatttacaaacaaggaagtacactgcaaatcccttggcctctgtgtgcattttggtcatggcctgattgccactttgtccttttgactttcagagccagctgctacaagtttcttttaatcaataatccaccgagtgaatgaggcaaaattagcagcctggaaacttctgcctggtgagatgaagtcagcacatgtattttcagtcctaaggtcacacttctgactctttttggttctacccctaatctttatttttaattgctagcagttagctctcttgtgtcatggcggttacccagggcagctggcatctggtcaaacaaaagtaaaacagttaattaggagacaaaaggatgccctccagtgggcccaagttgtctgttctcataaacataagagttgtgacatcagggcagttgcacattcttgtcacccttggatttgtttggcgacgctttgggggtattttgccctaaggctgcatgagcctttacacttgaggttggtcagctttttgttcttaacagagactgaagacttatttactggagttatggtaacaaagagaaaaaagtctaggcttttacttatcatttcattttttctcccagaggtttataactaagtgcagtttttagatatgtttatggactctggtcttggagttctttgatgaggaaaggtaatttataacagtcaaattggccttttcaaccttatcacatgaaataaaaaaccaaaatgttggaaaggagctgatgtaatagagactttcaagctcctcatctgcttcgtggcttttcaccaacaggaaacaatgatggcagatttggggactgtcataagcatggggttttccattcagaaaggtaaggtaggtggggattttatttctcctttctcatctgcgagcaaccggattagcactgattgatttggttccaagaattgagtccattccgagattgccaacacacacacatacctcccaaacctgcttttttgcatggtcatgtaaccaaggcagctaacagtttaaaactggaaacaaagagaagtcatgaatgaaaagcaggcatattaatttagctttacaagtgtgccctttccaaagccaggattactcattccctggcagcctacagcatggagacctgagtctgctcaaacgccatggctttagagtgtcacttccatttggtgtgggattttaaggagagaggctccaactcagcagaaatgtccaactgtaattaaaatccttgtcattatgaagcaaacatagcttcaccgtaaaggggagaatggctcatttttagtgtcccagaaaagtcacaaatatcatacccagttacatgcagagaaaacttcctcattattggtgcattttgggaatgcattaaagggacattaaatctcagaaatgtgaaatgacagtggagacatttccatcttctaactgtgataaagaaatcagaacctgagctagctttctttcaggtccattttcactcttatgagatgctcagggtgaaaatgaatttatgttaacaggagggagaaaatggtttctttgaaccattatgacctggttgctttcctttctctcctctaatggtaaaccttagtgtactcacatgtacctacaagtggggcaggaagtgaggagcccaaagccccaccccaaggcttcagatactgtttttctgccaacgatccccatatttgtgtctctggctcagactctcttctgggcttccaactgcattctcagtgtctcatagccatctcaaactccacacagccaaagccaactcatcatcttctcttcctgcctcgcctcatgtttccccatctcatccatctaaatgttgcagcctgggagttacctctacagggtccatccctcaagtcccacatccaatccacgaagtacgttccatcagtttcaccttcaaaatttatatccatttcaatcattgccctctgtttccactcccacaatggtctgagcctctgtcgctcttacctgaatttctgcagtagtctcttcatgaatcttcttgcttcccttcttgccccttgtccctctatcaaatctgcactccacattccagctgaattagacttttaaaaaagtaggtcagctcatgccattagactatctagaggcgtcaaggttctccactgcactcaggaggaaacacaaaacccctggtgtggccactaggtttggcttaacgtgctccctgctcacttctccagcattatctcagcacgctcccttctcagtgtacttggaccacagaatgcaccactaatggcagtgtcttgaacacacccagcttttctccatctcacaggctttcttgttcctggactggtctttacccttcctctctcacacacagactctctgtctctttctgcctaactcactctttctcatctttcaggtcacagctcaaaagtcatttcctagggacaccccacgacctcgccccttgtcctcatttcctttgagcacttgatactacatgtaagtctattatttatttgcctattttgcctaatatttatgtaacttataatttacccacttacagagacccctccctccaaaacaaggtttccttccatgaagtcaggagctaggtctattttgtccccaactatatgtccaagacctgcctgctacacaatacattctaaataaaacaaaatgctgaacgaagacatgaataattgaatgagatcatcttttttctctcaattcaggttagttaaggaacctgagtttcttaaatagttgttgagaggtactcacatgtttttattcacatacagatctagttttccctgtgcagatgtagagaattagcaaataattgtggcctagagaatctaccagagtcctcctttcagaggaaccactttctgttgcctctgggagtgctgttccacagcgcagggaagagatggggaagaaccagaaaataaaggcttctggctttccactttagatttcgtaattcattttccgtgaaaacgatagggccaagtggaaattgtactgttttaaaagtttctgggggccagctctgggaaaccaaacatcatttagatttagaacatcagtttatgggaagaaatgtgttccaaattctaacaaccaacatatcctccaaaaatgactcggaacaaaaactctaagtggggagtttgcctgttttgtgttttagatgaatttgtaaaaatactgtgactcatcaccagccacaccctccccggctctcatcttaatttgggttctggttagcatgcattggacaacattgggaatgcctcggagataatttattcacactggaatttttttatttgcattgaggcagagccaggaaacacttattttcttgtccatattaggaagtagcttccgatgcaccaagaaagtgcaatattgaaccattctcctggcctccctcaagctccagagttaatcctcctattaggagtaaaaaccaatcccattggtgagattgggagctcctgactaatctgattgctgagatcaggagtccctgaccaatcagattggtgagacaggatggaggacatcctttcccagacctctcgcctgagcactaggggattgcattgaaaaagcaagggcctccttctctcgcatgctggattctgtgtgatgagacttggaggacatggagagggtggctgttcagcctccagtcaccctgtttgttcgtttgtttatttatttatttgatggagttttgcccttgttgcccaggctggagtgcaatggcgggatctcggctcactgcaacctctgcctccagggttcaagtgattctcctgcctcagcctcccgagtagctgggattaccagcgcctgctaccacgctcactaattttttcgtatttttaatagagacggggtttcaccatgttggccaggctggtctcaaactcctgacctcaggtgatccacccacctcggcctcccaaagtgttgggattacaggcgtgagccactgctccaggccatcaccctgttttaaacaggctgcgcatgcacagggatgccagcccagctgagacaggtctctgctctcttgcttacgtcttcttccccgtcactcttttgattggtgtagtcggactcttgcataccatagttcagagaggacgggatacacctttgagtcatttttaatccagctcctcagaaagctgatacaatctttaatatcccctattggctctttatttctgtcctcagccagaatggaactctccatcctcaacctccaattttcaatcatttgaattgtattttaaattgttttttccataaacaactttgctatacctatgtataaaatgcttgtgaaaataaatctagtgctcgtgttagaaagtgtatagatcaagtgtttgcctagtttgcaaaaccagtgttaaaacaaaatcttcctgcattctagatttttcaaggaaacaggcaaactccctgaggaattttatattaaggggctttgccatgaagtcaatccagtcaaatgcacgcccatgtatcttatctctgtagctagcatttctgctctatacttttgtcatcatttaaatagttttgcagtgctttgctgacatagaattattccatcatgtcattgaagagaaccaggcctagaaagatgtggtggcttgcccaaaatcacagtgagtcttggagctgggcacacaaatccaacatccagctctcaaatctgccctctacaaattccaaattgcttgcagaggctgcagtttccttctaaaaacagttctcaggaaaattcagcttgctgttttggaggaagtgccatctttttcctatctttatgcctaaggtatctcacttgatcttgtcttgaaggggatttttgggcagagatggggctaaaagccatgaggataaatgaaatgagttgttgcatggagaaaatcagattttctttgcaatgcctctaagtttttcatcagggtaggaagaacatacagatttgaactcttcactgttacaaattttagccattttgagcaatctggttcgtaggggtcaggaagatgtcacctttatgacacattcctttatttcatgcctttttaaaagaattaaggacatttctctttgaagtaaaactacctcctccaaggctctgtgcaatgctgagtattgtacattctgggacagtcatggcaaagagaaccaagctgtcatttattaggcaaaggctgtgtagcctcctctaggattttgtttccagccctgaggacactgtcaacacttaataaatgaagaaaaacagcaataataaatatcatgaatggaaagaacaatgtgaaaggcactccagacttcttttctccaggaagaaatttctgaagttgtcttagactttggaaaaaatcccaagatactattaatataatggcacttacctctattttcaggggacaaaatcctttagacttcctattttgagaaggcctggttgattgcactgattaattaattgggttggctgattttccaaacctcatcgccatgaaaaagcaactggaaaacatattctttttacatgtggagttctctaaactggttcagacagctggaccccattttgtgtttgttttttcaaacagattcttcgtgctctaaaccaaatccagctgtatgtactaattgcatttcagtgaccaggttggatgttgtctttttgagaaaatttcatttaaaaggaaaacagatgcttccgcctcactgtggtgcattattgcttttgtcccaatgttatactttgtctgagagcattcatctggtaaaccgaggctgtgctggtgttctgtgcatgtcgtactgttataggcagacaattatgccagatggcctctaaaggctctcaaatgtgtttgcacctctttcctcacactacttcctcatatacatgtgtacacacacgtttgaaatatcaagagaaattattttttaatttaaaaaattatagaagtcaaacactctcagtgaaaaagctaaaagtaagaagaaaaaaatacttcaagtgaatagtgtaaatttacctgctcctttagtacccaataacaataacacacacatatacgctcaaatgtgcccacatacataaccttatccccagtctctagggctaatctttatctgtctatgccacagattatttgcagcttgtatttattatctaaggttgcataacaaatcactctaaaactcagtggcttaaaataacactaatcgtttactatctctcacagtgttctgtggatcaggagttagggagtggctttactaagtggttctggcttggggactctcatgaggttgtagccagatgctggctgaggatgcagtcatttgaagacatgactggggctggaggaccctcttgcaagatggctcactcctatggctggcatgttggtgctggcttctagtagaagcttcagtttatcttcatgtgggtttacatagcctgcttgaatgtcctcatggaatggtgcctgactccccataaagagtgatccaagagaacaaggtggaaggtgcaatgcctgttacattctacccttggaagtcacacatcatcacgtctactatattctttggtcagtcaggctagccctggttcagtgtgggaggtgactacagagaagtacacattccagaaaataaacataatttgggtccattttagatgacagctaccacagagctcccattaagtggtggggtctacttctccactccttgaatctaggcaagcctgacaatgtgctttgttcatagaagttggtagaaatgatatggaatactatgtcgtcataaaaaggaatgaaattatgtcctttgcagcaacatagatgcagctggaggccattatcctaagggaattaacgcaggaacagaaaaccaaatactgcatgttttcacttctaagtgggagttaaactttgggtacctgcgggcataaagatgggaacaatagacaattgggaatattagaggggtactagaagggacagaggggcaagagctgaaaagctactgggtactatgctcactacacgggagataggattatttgtaccccaaacctcagcctcatgtaatatacccatgtaacaaacttgttcatgtaccacctgaatctaaaataaatctaaagtaaaataaaataaaataaaataaaagttatttttttaaaaaagaatggaaaggtaccagaacaaatacataaaaaagaaattggtagaaataaaattgtggcaatcccaagccacggctcaagatttgccttttctgcttttctccttgaggatgagagaaaggccaggtagaaagagttgtcccagctgtccctgctttggggacatatattagtaagcctagccaacaccgtatctagcagagatgacttgtcctagctaagcccaacccaaattgccagcccacaaaatcataaacaaataagtgattgttgttttaaatcactaaattttgggggatggtttgttacacagcaatagaaaattgatacaatacgataaacaatggtctacattttgttgatttcatatccaacaatatactgtgggtatcctttcatgttagtatgtatagctgtctgtcatatttaaaaaattccaatatgaaaattttataatatggaagtgtcctaatttttaacatatttgccattagtgggcattcaggttgtccataaaatttttgctactgcaaggaatgctttaggaacattacctgttctgttacttgttggttacatttgtagaagtgaagttgctagggaaaagggattagagatgtcatcaaatatttgaagtgtcaaaaatagctgtgccaatttccatcacactaacaatgtatcaaattttaaaggaaaatcctaaaagctcgttgatgccctcttcctgaaaattcaaagccaggcctttgttcaaagccaggaggtggtgaaacagagctgggagcagtataggactgtgtgggaccactgattcctctgaagatgtagtgagaacagaccaaggaactcagggtagaaatacaaaaggtaggtacatgacagaggagtaaatggaaatgtggaggaggttggcttttctcatagaatcctgacactttttctatctccaagagctttttcagaaataaatttaatagacaagactgctaactaaaagccttttttaaaaaagtattacaataatcagtagtaaatctgaagtattaaagataacagtagtggttagagtcttatacaaattcaacattaaggccttaaatctaacttgtcagtcacttattttagccagagcatttgcatggaccccaggccccctggaggccctgtgcgactctagaggttcaaataatgatgcctaacaccatgtggcagatatgatcgaaacgaatctacatatattcctacatgcatttaattcacacagcagatgaagaaactaaggcatagtggagtagctaggtaattttctgaagtttagggtggtaataagtagaggagcagaatgttaatctctttgttccgagaagctctgatcgtatcaacttctgtgtggttgaccagttggctgcttgcttccaccattcttcctttctggaagaggcttgggatgcattcacttcccagccttgcttgcagctagaacatgcacacatgcaacccaatattggccaatgggaacttagggaagtcagctgggggacttcagggaagactttttttcctaatagaagaagatgcctgcaaagaaacctctttctctcttccaaatattgtgggagtgtaaatgtgtcgcttagaatgtggcagcccctatgctgccaagcttgcagattgcagagtggagagatgggaagaggctctattcttcatgatgctattgatctgctaatccaatctcagccttgcctgcctatctctcaacttcttctattgtaagattattaagtttcgtttttgtttaaaaccacttttagtggatctgttctgttacttgtagctgaaagcaactgaaacattattactttatgcctccaagaatacttaattaattgtaatctcagtattttgaaactgtattttaaatggagctgggaaaccctataagaatacagagcacacatttcatatacaacaatcagactcctgcttcattctgttctttgagctacaaacacataaaacattattaatgacaaattgagtcatttttaaatgaatcttactaaaagtacaaatgaaaaaaaaactaattcactttttttaagctggaggaaacctagttttaaaaagtgctaatttactttgctgtgcaaaggcctagtagtaattgttgaaataaggggaaatcagaaatatgaattggaagtacccccctgccatggaccaggatgtgtatactttgctctgtacttttaccataaatagttttcaaaattttatgtaactattcatcaagagatggtcatttatattttggaagtttaaaaattcagaatggtcctcacttctgcatatttctattggaaaacaggatccatattctgtttggatagaatataatgaaagggaataaaatcttgaaagcagttttggtagaaatcaaaatttttgcttcagattacactgccctaaatggcaacctgactgagaataaattagtgtgaactgattccacactgtcaggcaagctgtccgcacctgctgaggtgatagttgagggtgggggagttctgtatatatttagacaaagagagagagatggatttgaaggaattggctcatgcaattatggaggctggtaggctggagacccagggaagagctgatgttggagttcaagtacaaaggccatctgctggcagaattccctattcttctgtggaagtcagtctttgtctattaatgccttcaccagattggatgaagcccatccacattacagaagagtaatctgctttactcaaagtctactgattaaatgttaatctcatttaaaaataccttcagagaaagatctatttggtaaaacattattctattaggttggtgcaaaataattgtggtttttgccattatgtttttattatcatactttaagttctgggatacatgtgaagaatgtgcaggtttgttacataggtatacacatgccatagtggtttgctgtgcccatcaacccatcatctacattaggttatttctccttatgctatccctcccctagctccccacctcctgacagtccccagtgtgtgatgttcccctccctgtgtctatgtgttctcattgtttaactctcatttatgaatgagaacatgcggtgtttggttttctgttcctgtgttagtttgctaagaacaatggtttccagcttcattcatgttcctgaaaaggacacgaactcatccctttttatggctgcatagtattccatggtatatatgtgccacattttctttatccagtctatcactgatggcatttgggttggttccaagtctttgctattgtgaacagtgccacaataaacatacgtgtgcatgtgtctttatagtagaatgatttataatcctttgggtatatacccagtaatgggattgctgggtccaatggtatttctggttctagatccttgaggaatcaccacactgtcttccacaatggttaaactaatttacactcccaccaacagtgtaaaagcattcctatttctccacatcctctccagccatctgttgtttcctgactttttagtgattgccattctaactggcgtgagatggtatctcactgtggttttgatttgcatttctctaatgatcagtgatgatgagctttttttcatgtgtttgttggccgcataaatgtcctcttctgagaaatgtctgttcatatccttcacccactttttgatgaggttgtttttttcttgtaaatttgtttaagttctttgtagattctggatattagccctttgtcagatggaaagattgcaaaaattttctcccattctgtaggttgcctgttcactctgataatagtttcctttgctgtgcagaagctctttggtttaattaggtcccatttgtcaattctggcttctgttgccattgcttttggtgttttagtcatgaagtgtttgcccatgcctatgtcctgaatggcattgcctaggttttcttctagggtttttatagttttaggtcttacatttaagtctttaatccattttgagttcacttttgtacaaggtgtaaagaaggggtccagtctcagttttctgcatatggctagccagtttttccaacaccatttattaaatagggaatcctttccacattgcttgtttttgtcaggtttgttaaagagcagatggttgcgtgtgtgtggtgttaattctgaggcttctgttctgatccactgatctatataaaatgagttagatattttgagatatctgttttggtaccagtaccatgctgtttttgttactgtagccttgtagtatagtttgaagtcaggtagtgtgatgcctccagctttgttctttttgcttaggattgtcttggctatacaggctcttttttggttggatatgaaatttgaagtagtttttttctaattctgtgaagaaagtcaatggtagcttgatagggatagcattgaatccataaattactttgggcagaatggccattttcactatattgattcttcctatccatgagcatggaatgttttcccatttgtttatgtcctctcttatttccttgagcagtggtttgtagttctccttgaagaggtccttcacatcccttgtaagttgtattcctaggaattttattctctttgttgaaattgtgaatgggaattcactcatgatttggctttgtgtttgtctattattggtgtataggaatgcttgtgatttttgcaaattgattttgtatcctgagactttgctgaaattgcttatcagctttaggagattttgggctgagacgatggggttttctaaatatgtgatcatgtcatctgcaaacagagacaatttgacttcctctcttcctattttaataccctttatttctttcttttacatgattgccctggccagaacttccaatactatgttgaatgggagtggtgagagagggcatccttgtcttgtgcccgttttcaaagggaatgcttccagtttttgcccattcagtatgatattggctgtgggtttgtcataaatagctcttattattttgagatatgttccatcagtacctagtctattgagagtttttagcatgaaggggtgttgaattttatcgaaggccttttctgcatctattgagataatcatgtggtttttgtcattggttctgtttatgtgatggattacatttattgctttgcatatgttgaaccagccttgcatcccagggatgaagccaacttgatcatggtggataagctttttgatatgctgctggattcagtttcccagtattttattgaggattttcacatcgatgttcatcagggatattggcctgaaattttctttttttgttgtgtctctgcctggttttagtatcaggatgatgctggcctcataaaatgagttaggaaggagtccctctttttctattgttcacaatagtttcagaaggaatggtaccagctcctctttgtacctctggtagaatttggctgtgaatccgtctgatcctgggccttttttggttggtagactattaatttgtgcctcaatttcagaacttgttattggtctattcagagatgcgacttctttttggtttagtcttaggagggtgtatgtgtccaggaatttatccatttcttctagattttctagtttatttgcgtagaggtgtttatagtactctctgacggtagtttgtatttctgtggagtcagtggtgatatccctttatcattttttattatgtctatttgattcttctctcttttcttctttattagtctggctagcagtctatctattttgttgatcttttcaaaaaccaactcctggattcattgattttttgaagggtttttcatgtctctatctctttcaattctgctcttagttatttcttgtcttctgctaggttttgaacttgtttgctcttgcttctctagttcttttaattttgatgttagggtgttgattttagatctttcccgctttctcctgtgggtatttagtgctttaaacttccttctgaacactgctttagctgtgtcccagagattctggtacattctgtctttgttctcattggtttcaaataacttatttatttctgccttaatttcgttatttacccagtcattcaggagcaggttgttcagttttcacggagttgtgtgattttgagtgagtttcttaatcctgagttctagtttgagtgcactgtggtctgagagactgttatgatttccattcttttgcatttgctgaggagtgttttattccaattatgtggtcaattttagaataagtgcaatgtggtgctgagaagaatgtatattctgttgattttggctggagagttctgtagatgtctattaggtccacttggtccagacctgagctcaagtcctaaatatccttgttaattttctgttttattgatctgtctaatattgacagtgggtgttaaagtctcccattattatagtgtgggagtttaggtctctttgtaggtcttgctttatgaatctgggtgcttctgtattgggtgcatataaatttaggatagttaacccttcttgttgtattgatccctctaccattatgtaatgcccttcttagtctttttttgatctttgttgattttaagtgtgttctatcagagactaagattgcaacccctgtttttttttgtcttttttgttttttctttccatttgcttggtcaatattcctccatccctttattttgagtctatgtatgtctttgcacatgagatgggtctcctgaatacagcacaccaatgggtcctgactcttcatccaatttgccagtctgtgtcttttaattgtggcatttagcccatttacatttaaggttaacattgttatatgttaatttgatcctgtcattatgatgctagctggttattttgcccattagtttgctgcagtttcttcatagtgtcaatggtctttataatttggtatgtttttgcagtggctggtacctgtttttcctttccatatttagtgcttccttcaggagctctcataaggcaggcctggtagtgacaaaatctctcagcatttgcttgtctgtaaaggcttttatttctccttcacttatgaagcttagtttggctggatatgaaattctgggttgaaaattcttttctttaagaatgttgaatatttgcccttactctcttctggcttgtagagtttctgcagagagatccactgttagtgtctgtttggcttccctttgtggttaactcaaactttctctctggctccccttaacattttttccttcatttcaaccttggtgaatctgacgattttatgtcttggggttggggttgctcttctcgtggagtatttttgtggtgttctctgtatttcctgaattcgaatgttggcctgtcttgctagcttggggaagttctctgggataatatcctgaatagcattttccaacttatggttccattctccccatcaatttcagttacaccaatgaaacgtaggtttggccttttcacatagtcccatatttcttagaggctttcttcattccttttcattcttttttctctaatcttgtcttcactgtttatttcattaagttcatcttcaatctctggtatcctttcttccacttgatcaatttgactattgatgcttgtgtatgcttcatgaagttcttgtgctatttttcagctccatcaggttgtttatattcttctctaaactggttattctagttagcaattcatctaaccttttttcaaggttcttagcttccttgcattgggttagaacttgctcctttagctcagaggagtttcttattacccaccttctgaagcctacttctgtcaattcttcaaactcattctctctccaattttgttcccttggtggcaatgagttgtgatcctttggaggagaagaggcatcctggtttttggaattttcagcctttttgtgctgtttttttctcatcttcattgatttatctatctttggtctttgatgttggtgaccttaggttggggtttctgtgtggacatcctttttgttgatgttgatgttattcctttccgtttgttagttttccttctaacagccaggcccctctgctgcaggtctgctggagtttgctggaggtctactgcagaccctgtttgcctgggtatcatcagtggaagctgcagaacagcaaagattgctgcctcttccttcctctggaagctttgtcccagaggggcacccgccaaataccagctggagctctcctttatgaggtgtctgttgacccctgctgggaggtgtctcccagtcaggaggcacgggggtcaggaacccacttgaggaggtagtctgccccttagcagagctcaagcactgtgctgggagatccgctgctctcttcagtgctggcaggcaggaacgtttaagtctgttgaagctgcacccacagccaccccttctcccaggtgctctgtcccagggagataggagtttgatccataagcttctgactggggctgctgtctttctttcagagacatccttcctagagaggaggaatctagagaggcagtctagctacagtggctttgcagagctgtggtgggctctgcccagttcaaacttcctggtggctttgtttacactttgaggggaaaaccacctactcaagtctcagtaattgtggacgcccctcccccaccaagctcgagcatcccaggtcgacatcagactgctgtgctggcagtcagactttcaagccagtggatcttatcttgctgggctccatgggggtgggatcccctgagctagactacttggttccctggcttcagtcctctttccaggggagtgaatggttctgtcttgctggctttccaggtgccactggggtatgaaaaaaactgtagctagctcagtgtctgctcaattttgtgctcagttttgtgcttgaaacccagggccctggtggcgtaggcaccagagggaatctcctggtctgtgggttgtgaagaccatgggaaaagcatagtatctgggccagagtgcaccgtccctcacagcacagtccctcacagcttcccttggctaggggaggggtttaccctaccccttgaacttcctggatgaggtgacaccccacgctgcttcagtttgccctccgtgggctacacccactgtctaattagtcccagtgagatgatctgggtacctcagttggaaatgcataaatcacccaccttctgagttgatctcactgggagttgcagactggaactgttctttttcagccatcttgccagccactggcttttgccattatttttattggcaaaagccacaattgctttttcaccaacctaatagaataatgttttaccaaatatcggggtatcatgggtgtgatggttaatttcatgtatcaacttgactaggctaaaggatgcttagagagctggtaaaacattacttctggctgtgtctgagagggtgttcctggaagagattagcatttgaatctgtggacagagtaaggaagatccaccttcatcagtgtgggtaggcattatctgatctattaagaactgcagtagaacaaaaaggtgggagaatggcaaattctctttctcttcttaaggtgggacatccaacttctcctgcctccagacaatgaagctcctggtttttgggcctttggaccctaggacttactccagcaggtcgtgccccctcagccctgccacactggtgagggtagatttccccaatccctgttctccagcttatagatggcatattgtgagagttctaggcctgcatacccatgtgagagccaattcctataatatatcttttttccttccttcctccctttcccttttttccttccttccttccttccctccctttcatttctttttctttttgttcttctctttctttctctctctctctttcttcctcttcttcttttttcctttttttttccctttttctgtttctctggagagccttgactcgtccagttgcctcaccaagttgacacacaaaattaaccatcacaagggcacagttgactgacagtttgcagctgccccacgttcggatccactggaacattcataccagggccatgcttcctggggtctgttccctgccaatggctaagtgcagggcgagtactagagtcaagccattcctgccctacatgggctcccccaatagacagcctttgctcaggattccccatcagcctggcagagactctctaagctggactgcaggtggaagctcctcttatctagttctccttgtatcttgctcttttttcacaagttttaccctttaattgaaattgaagtctcctttcaccttttccagctccttcctcctttatctttcacaggaaatatatacgaatgtagttagagacacacatccaccatcaaaaatttttaaaactggtgtataggttttccagccagtgtatactaggaattggctcatacaattatagaacattaatagtatattaatagtatggaacattataattcatcaaaagacaaatgcaaatgaaagttgatgcatagttgagaaaaaatatttcagaatatcattttctgagctacacaattccatggattccatttaaataagaaaaaaatagacgacgaagggaatggtaaaatctattggctaaaacattgctagaagttagggttaagttcttgtaggctgcagaatggaccagctaaacttagtctagaacatttcaatttctacttgactatatttataaagagcaaactcagtatctcagtgaatttgactcctaaataagaccaagagttagtccttgaaagccacaaaaattgccaggccaaagcaaatctctgctcctctagtgttgaaggtgaaagagggaaaagttcccagctagctgtgtgctaattttagaattgcaaagcccaatacaaaaagccaaccgaagtcatgcaaacaccgtgggtaaacaatgccatgccagctgcttgggacagaccagacatatggcaggtgaaggtaaacaagatttcctctgaaaggttcacttattattctttataatcttacttctcagtgggaaaaaaaatgagattggccagaattttggagtagtatgtttatctgcttgtttatttttaaatatctttatatttgttttctcacattaaaaaatgaaagcattctcatcaaagacagaatttcagcaatcctgaagtggatattgggaaaagcaaatgtttcctagcccctccatctcccctgcttgttcccctcccttctgtgactctcctgtccccctcacagaagtaagcactgttagtaattttgtgtgtatctaaacatttttctatgcacacgaaaagagaatagactattttaaaagaaaaatctctcaccatgtgttttcgaggcaatcgatattttttgttaccactctccaacatggctgaaagatgcgatgaaggaggtggtctatgctcatgactccctgttcgcgtttctgtttctctaaaacttctgtacctaattttaattaatttaaatgtacataactacacgtggctagtgggtactgtattggacagtgtaagtctaggaaaagtaatctttctccagagaagaccccatggaaggatttggaggaggagagccacatccccatactccttttcagtccctgaaccattgcataactgggtttccttttcagtccctgaaccattggataacttggactctgcagactacagcctttagacacagccgaaatataaaacataccacactcattggaaataaaggtagagaggaagaattgggttggtcaccagttgctatttcctcttagaataaagcaaaatataaactctctgtaatcacagattggaaatcaattgagtctatttctttgggtttatgaggacaatcacataaacaaatcttgctagatagtcacgtatttattgttaagaggcctccagagaaggaaatccccagtttttctccataccccaggtcaacatttaattggcctcactctacattactcagaaggcattttggttcttgtctacttcctggtactcactatggagcagctggtcatcatctctcttcttggattatgatttttaaaagcctcattcagcttccatatttgttctatgagcttctcatcctagatcccgggtaatcataatcagtcataaatagctccctttgccctaaggggcagtgagcaaatagctggaaaagttgaagatgatactgcatggagacacgagctatcagatggcctgttcttggcacatgaaagggtatgatctataacttgtacaacacagatacatcttgagatccaaaactgagcacagagcttattttcttccatttctactcaacatgcttgtgtggccagaggataccattttgtatacagggccatgttaagacttccaagcatcctggaggcagaaatcctgtttgaagctagtggatacatgtagtggtttcttttttcccaaatgaaaataaaaaataaaacacaaatcccatcttttatgattaaaaaataatttcagttcactattttaaaacacaaacacaaaaaagtagaaagaagggagtaataatcactaaagtcttccacccaaagatgatagctagttgtttttttcgtgaacattattacaaacattttttctctgcatgtacatacaaatatgtacctccactcttaggcctgcaacatctggaaggatgtgaaggcaaaacccattttcagaaagaaagtatggatgatagctcacttacttgggtcaataagatggtacagaacattgcctttcccttggaattacatttcagggcaaaagcagtcacctcaggtgggcatctggctctgagcctcttctctggtctatcattctcttcccctcttcctcctataattcttatatgcagtggtgagatctcggctcactgcaacctccatctcctgggttaaagcagttctcttgcctcagcctcccaagtagctgggactataagcatgcgccattaagcccaactaaattttttattttttgtagcgacaaggtttcaccatgttggccagtctggtcttgagctcctgacctcaggtgatccaccagcttcggcctcccaaagtgctgggattacaggtatgagccattgtgcccggctgataattcttacagtttcttctactccctgcccactcctggaggatctagctccattctagatgttcagggccctatcctgtgccatccccaaagggcttctctccttactaagcagggtagaagaggctacgtgttgcatagagaaattgtctttgaggaccagcactcaccatcaagttcatgttgagggccaaacctgtccacctaagtgcctttgcaccacacacttctaccactgggaatctgtacaaaaagaggagaatgtgagttattctaacactttgaggataggaagaggcatcaataaaacctgaattccatcacaatgttttggcaataaggccagactccctcccaagacattccctttaagccttgatgttttatctgtaaagtgagaagagtgatatcttcttcacaaggttgttgggaaaataaaatgagatacatgtagcagtttaaagaaggccaagaatgagatagaccccctaggcagctgctctccaagaggtctctaaaagcatcagtgccctgatattccaggataagatctttagctttgtaagttcagaatttaaattattagttcatttagatagtgccttatggtaagtattggtattgcagaatatactcacattaccaaaactcgctagagactgaactataaactagaatgcaatttaataaacaataaaaattataacttatcttgctggtcagtaaatctacagggaaagtaacttataagcagaatattcctcagtgaacgggaaacagagccggatttttttgggtaacaatagtgattaatgtcttctaaccatgatagcctgggggcaaccaccatcctaactgggatagtgctgctgcatggactgaatgctggaatgtgtagattaaggcagccttttttctgcatagtgcctggatgaataaaccttgtctttttagcttccaccacaccccctgtcaccgccaccaccttcttcctgccaccgcagtgcccagacttggatacattaacgtttctcattaggatgcaatcatgcttctacttaaattatcttaggaagagcacatagtactactggaagttaataggcattactataaaacaggtgccatcgtcaagaaagtttagaaaacactgaattaaacaagctaaatacttaaaaaaaaccacaaaaaccgtcagatttctcagaggctgaatgtgaactatgtcgacattgttcaccattccatctacctccttaaaaaagagcacttactaaatctctgttgagtgaatgaaagtccttggtgatctttctatgtgactgggcaagttacttcacctctttatgtccagtttcttatctgtgaaatgaggataaaggatctaccttatagggttgttatgaggaataaattggttaatgtatgtaaagtgcttaaaacagtgcctggcatatattaagcatcatgtgtttcatattcattacttccatacctgtttatactttcactacatatgtgtgcatccatgaacatatgtggtacaattttgtgctttacaagtttgaataaattgaaccatactagatccatcaatttgcaactattaatatatgtattttttagtttattcatttttattgttgtgtaatattccattgtataaataactgcaacttaactatctcctttttttggcatttaggctgttcctagtctctgctattatgaatgattacattgtaaatattcttatatgtctccttataaacgttgtgtataactgcctagataaattttgtttttttttttttttgtcacattctcacaaagtaatcttatcattaagtccttagggggaatgataccaattacataacatattgaaaagctgatgcctggctcagagaggatgccctattattccatatgatttcatcttcccaatcaaagcatgtactctaaggagaacaggaaatgggagaatgcagcagattattcttcaaaatagcctcgtgaccctggggcagattgtttgttctttggacctcagtttcttcacctggaaaatgagtggttatctcttaggtcctttcacacctccgagtttttaaagtctgtattctacatgatctagaacaccactggagcaaaaaaagcactccataaatgcttgttgattgaaatggggccaaggtgacaagatgcattttgaaaaagctgttccatgagtgccagaacaacatgttcccataaaggagcggaagagcacaggactaatataaagcttttgggaaaccttaaagcaacaggggaaagtcccccaaagcagaaattggctagataaccacaggagaaatatcaggaaattgcacaactttgtaagaaccagattaaaaatgctaagggaaggagacattctacttttaagagacatgaagcaagaggcaagagccagttgttgctcagagtgaaataatgtagaaagtcaacagcctctaaatatcctctcccccacaaaagttctgctcttgttggagatttttaaaaatagaacaaaaggttatcactcccaccagcagacacaatgtcctaatgtctccaaccaaaagttctcttctttgaccctgcttcctcctctaattaccatcatatggctaatggcattgcccttcaccctatcgtatctcctcatccctgaagggagaaggagagagactttttggtataataatgcatccaagtcttctttcattataagaatgcaccatgctcctcccaggttgcactgagtggaaccaataatctggaggtgaaacaaagtgggacaaaaggaaagtgcacagaggcgagaaagagcaaaattgagatgctgacatattacaccagaaaatagaacatttccggctgtagctggtactgctggttatttcatgatatggtttggatctgtgtccccacccaaatctcatgtcaaattgtaatctccaatgttggaggtgggggcctggtgggaagtgattggattatgggcaaattttcccctttggtgctgttcttgtgatcgaattttcataagatctggttgtttgaaagtgtatagcacctcctcctctcttcctccttctctggccatgtgagatgtcttgctcctccttcgccttcagccatgattgaaagtttcctgaggcctccccaggagctgagcagatgccagcaacatgattcctacacaacctgcagaactgtgagccaattaaacctctttttttggtaaactagccagtctcaggaatttctttatagctgtgtgaaaatggactaatatatctcctaacatcttttctctcctctgtgaaatgaggataaagtatctaccttgtagggttgttatgaggaataaatcggttaatgtatgtaaagtgcttaaaacagtgcctggcatatattaagcatcatgtgtttcatattcattacttccatacctgtttatactttcactacatatgtgtgcatccataaacatatgtggtacaattttgtgttttacaagtttgaataaattgaaccatactagatccatcaatttgcaactattaatatatgtattttttagtttattcatttttattgatgtgtaatattccattgtataaataactgcaacttaactttctcctttttttgtgcatttaggctgtttctagtctctgctattatgaataattacattgtaaatattcttatatgtctccttataaacattgtgtatagatggaaatagaagtttaagccaggatgtggaagttcagctacaaaacctacttcccagcctgctttgcaattaaagatggccatgtgactaggatctggccaatgggatttgagtgaaagagatatgtgtaaatttctcacacattctctcgttgtaagggcatgttaaagggaagaattgtgtccttcccttgctttctgactggaatgtggatggtgggggcagttagagcagctctcttgggctatcttatcgactgaattgtgtccctgccaaatgtatatgttgaagccgtaagtcccaacatgactgtatttgaagatatggcctatagggagatgattaaggttaaataaagttacaaaggtgggaccctaatccaataggactagtgtcctttaagaagaggcacccagaggaaagatcaggtgaggacacagtgagaaggtagccatttgcaagccagaaagagagacctcaccagaaaccaactctgttgacaccttggtcttggacttctagccttctgaactgtgagaaaatgagtttctgttgtttaagccaccaagtctgtggcattctgttatggcagcctaatacaggcatgagatagaagtcacacattgaggatgacaggacaacaaaattagaaggaacctgggttcatggtggctgtgaagttgccatgccaaccttggattaccttcctgaggttctacatgagagtgcacaagcttctgttatttgggggtctttattaaagcctcgaagcatgtatccaaatttacacagcaactctcctggataaagaaggattggttcaaagtgaaacattcctatgttgtatgtttataattagctatagcgtttaacttaactgtatggtaatgttagttaatagtgcatccatagtgaaataaatcattttaagacatactttttggcttacaacccagttaagatccctaacagaatatcaaatacataaacaattatttgaaataaagtgatggccactaaatatatgttctctaaactagtatccacacagtgatgttttagtgctttcttgtagctacctgctccttcatcttccattttgtagaaaaagagatggtactggagattaagaatgtctacctggaaaaggatgggtatccattgtgtctgtgatgcttccaatctgtagtctcacacaccctcaagaaactaagcagagatgtgaaaatcatgatccacaactgttgtcctcagaaacatcaaaaaaagaatttatgatgatggacagaatttttgaagtagcttaaatttattatactggttggttgtctttgataaggaactaaaggtttaagtcagttctcagactatgcagacacagacagtaaaacgtatccttaaaatttcataaaagcaacaaagttaatattattgaaataatttctgaagttgatagaagggatatgttgagacaatttatgatgtggtgcatggaaacctctcctgtattgcaattctgaagaatggcctggcagaccatgagctatttatacagtgcacatgtgtgtatataaaacacacttacagactttgtgcatgatttgtcttccacctctccaaagtcctcttcagaaccagggatctctgcatttgcttatttcctgtgacatttgctatttcactgcatctggccctgtttcttctctcacagtttataataaccatcccacccgttaaagatatatggacagccaccccctccaattgttaatattgctcttaaaatggatggcaaggtctctgctgagtatgttaaggagtcataaaatcaagtctaaactttcaatttgtcactcttggagtgtgggaacctgacctctgatataaagtctatctcttatccttccatctcaaagttttctttcttcagttttttttaataaacatacagttattgagtgacttgtggcagatgtggtgttagactgctttgcatacattgtcttacttaaaacacaagagtagactctgttggtattgtctatccaatatcacatgctctcttatttcttactaacaaaacttgaattttgcagaagaaatgatatatacagaattttgcagaaaaagatatatacttgcttttcctaccctcttttgctggtaggcataactgtgtcagacatgactgtgccaccagctggccagtgagtagaaggatactgctgtagagaggtggttctgaagcggcatttgctttcttgataaagggaacagagatagctggcattactgcatcttctttctgcctaaaacccagacgtgatggctggagctgttgcaaccatcttgcagtggtgaagatgtcagccataatatcactgagctgttgaacctatgtaagcagctgtctgaactaactgtcaagattgacatccttgaacttctgaacctgtgtcagcagctgccaagttccaaacttcatattatgaataaataaaactagcaactccttgtttaagtctctatagtcagattttgttatttgcagttatcctaattgatacaactcacaatgacactgaagttggttttaattctgctcagtctatcttttttcttcttttcctctcctttactgtattctcagtccatttgtttctcctctcagctctgtttatcctgatccctttccatccagtgtttctacttgatttaattttctttttgagtttttcttccttgctctgtttcttcctggagtctatagaggcctgtcctgtccatctattgtatgatgaaatctgacttggtccagggaaatcagtgatgtggctttgatgtccttgtggccagcctttcttaggttaccctaaccatgacacatacatactcctagctggttaaggtaagataagaacagagttttccttaggtcttcgaaaagtatcctgtaaagagcaatgatttccatgctctatgtgtaccctcacaatactgctgctggttgcctacctaatagtcattccctcgtccttccttcctagccgaaccctcatatttttctctgataattgaggcagtttgtgctgatagaatgaaggccccgcctccagccacaagaaatgatctataactattcaaagaataatgctaatcccatttcccttgactgaaatagtccatttccatctattcattcatgcagtcaaccttttctattagcaccttcaacataggaatcctagttatttttaagtccctttgtgataatcccagcatctctaagctgtctgtgttgattgctttatctcttaacgatgggacttttcccccccttgcttgtttatgtctcataatttctactgaatgccaagcattgtgtttgaagaatggtaggggctgaagtgaatggtattcatgcccagaaatggccatgcctcttcttctgtcaagctgttagtgtgggggagttgagataggtctgggttttgttactgctatcattacttgtagtgtaccacagacttcggattcctctggtgggatgctgtctttagttcttgctcagtgggaggccttgggtactagagtaagtttttctgcttttgctccactctcagatttcaactgttcttgcatggtggttccatggagggatttgctttccctgttcttgatcctcttcttgcagtagactactgtcacttttcacctggtgctaggttcttgattgggtggggatgggaccttctcaatttttctagtccagcctcagtcttaggtagaaacagtgcaccttggcttcttcctctccctttactgcccatggccccaaactctgtctcctattggtgtgtacccttaggtaggagagatttttcctataccctccccagaagcagcagaactctgccttgttttggtacaagatcctggggccaagaggttttcttgctccttctctaggggcagattgtttttgtttctattcctcccctagaagcagtagatctttgcctggttgccagggccaggaaggaggcatttatataccccttacccagaggcagatgggttttccttatacccctccccaggagctcttcggagaagtttttgctgcattttccccagtggtataagactttagctttgcatgacagaaaggttaggggaaatatatagtgcttgctacctcttctccaatggcacttgatcccttcctacaaacctgggccactgagaggtactgtctctggtctcctaccctgccttcagtctccatgagcccctgttagaggcccatgaagagcttgagagagagagagcttcccttgtgtctacagctcctcatatacaagcccacactaagtctttaggaatttgttaacattttggctttcttcttactcacttctatggcagccaccttttctccctatgcattgccaaaaaaatgaaacagtctgtgtatctcatttctcctaggagagtcttgtcgatttttggcattcaatttctttggttgtcttgagacctcagctctctgaggggcttaagaaaagttatgattttatagattatccagatttttctcactgttagtaggagagcaatgtactcttgcggttttctatactctaggtagagccagaactttgagaaaccttagctgttttaaatataaaatttgtccaaaatctgcccacttctcaccatttttaccacccgcatcctgatctcacccagcatcatctctcacttgctttattacaaaatctttccaaccagagtccctgcttttcttcatgctttgaatgcagtcttttctcaacacagtggccagagtgatgcttttaaaacataaatcagatcatgacatgttttttttttctccaaaaccttccaaggataccccacctaaaataaaaaccgaagtcctttaaggaggatagagggtgtaaggcacagccctctccctcactccctgtgtcccagtcacgtggctgcttgctgtgccttgcacacatcaggcacattctagccttaagtgtttgcaatggcagttcccctccctggaactccctctccccaggtacctgcaccattgctctcctctcacccccttcacatctattctgaaaagactcccctggcaatgctatttaaattgctgcccacccactccccacacctccagtcttgcttattctgatctacttgttctttttctgcatcacatttatcatcttctaacatattatgtaatttacttattttagtcatttttgcttattttctatctccctctgctaaactgtcaactccaaaagtagaggaattattatctgttttgttttatgatgcattttaagtatctagaaccacacctggaacatagcaggtgctctcctaaatatttgtggaatcaatgaataaatgttcatggtggtattatttgtggactgggttgctgaaggcaatctgtctccataattgggacagtggtgggtaagtgttgaggttgtatatcatgaaatatataacataatacaatatgtaaaagttaaaatgcatatgcacaaaaattattcattttgcaaacacacatacatgcaaaaatatatattaaacatgttaggatggatggtggtagggaaggacaatgtgagtgtggaagggagataggaggaaacacataaggaagaaagaaaagtggaaggaagggaaagaatggaatagacttcccaaagacaaattaaaataatgcatcgtgaaacgaggaatgggaattaattcaatacaaggcatgtgaggttaaaaaaatgcatttcagaacttttattaactcaaattactcttcccctctgtgaatcagaacagaagtttactgtgatttaacttctcaggtggggaatttgtggttcaggttgagtgatgtaggagctaagactcagaagacctaagactgcacctcatgaaggggcactgtgatgccccttgtctgcaagtgatttatagcattgctactatggctgagtcagccagctctacaatttatttcttgaagctctttaacttgtcccaagattgataggttttccgtctctaacctaagctgtttctttccctccctcttatatcgtctaccaataaaatgttttcaagccaagggcaaaattatcatgtaactttctttttgctgtttgaaatcaattatgggctttttgggagtttatgaagttacctacatacataaagcaataaacaagctgaatcaaacaaatcccaagtaaagaggctggtcattaagagacactgaatggaaggggctcagtcccatgtggttcatatattctgaagctttcctggaatagagcttcacatttctctgaacaggagacatgcaagtatttattatgaaactctcttattctgatctgcatgggacattttgttcctaataacatgaagctggtccttatctcaaccaattctttacatgcttgtgttttactttattttatttataccccaaacactaaaagaaattattttactgcctttcataaagagatacatcagggaagtggggtgtgagaaggaagctctgctgtttaggaaatgagagcccggccggggactgggtccctctagcctcagtgtgagctcattcaaagcacgtctgagagttaagagatggggctgtgcccttaaacagaaacgatcacaaagatccatgatgagttcttccagcagatggggaaactgaggttaggattgaatggaaggattttgagggtgaagctagcaaaaggaaatgtacttactcagaaagggaatgggttgtgagtctcctgcatttcttctccctccctaggtgctgacaaagcaagtcttcccaaggtttccaggataaatggcccagaaacatatggaatatattttcccagaaactcaaatgtctttcaagctgaagtggaaaactgctctgaaaatacacaccagaggttacctttgggccccaattcatccaaacacattttaaaatattttgctgatttttaaaaactaagcaaatttatagacttgaatatgtccttcgcacaaagaataaataacagtcactggtaggtttttaaccctttatgtgaatttcccttattgtagcaggccgggccaaggccccaggtacccatggtctggggagagtttctaggaattgtgggttattgctggcagctgcttctatctgctctcgtgacctttcttccctccctcttctccagcaagggtgccatcagcacagcttgccacagagggagtgtgcctcaagagaggaggtgacgggagaagtcattcattcatgcaaaaccatacgttcattcattcattccttcatccagcaaatatttctcaaacacttaatatgtgccaggcacttaaggtgctggtcatttcgtcttctgttgagctgggctgcattcgattgctaggactactgtaacaagctggtggcttacataacagaagtgtattgtctcacagttcttgaggctacaagcccaagatcaaggtgttggcagggtcacttccttctgagggatgtcaaagagagaatctgttccatgactctcctctagcctctggtgctttgctggcaatttttggcattcgttggcttacagaaacattactttgatctctgccttcatcttcacatgatgttcttcctgtgtgtgtgtgtttgtttccaaattttctttttttataaagacatcagtcacattgtaattaaggtctaccttaatggtttcattgtaacctgattaaccctataaaggttctttctctaactgaggtcacattctggggtattgggggtaggatttcaacatatgaattcaggaggcacataatccatgatatggactaagcaatatcagactggctgatcttgtcctgtgtatccaaccctttgagctataagagaatagcctctctgcacaaccatcttctctggaacttgggagccaagagtccccagaaatgcccccaagaagtagaagttatatctaggaggcatacttggacctcgggatctctttagtggcttcgccaaaagaccacggtaaaaaacctactcccaatttgattaagaagattagcaagttgcctggagtccccattcctcttctaagacaggagagagaagcaggtaccctaagcagcagtgtggcttcaaatgccctgggctactagctttttttttggcattaagtaaaatgtgatttgcatataattcttttctctaaccaacaaatcattataatttgctctgggagagccaaggtgagtttaacaaaattaatatgttgtctactggaaagaaaaatattctaaaatgtgattttcaggtctctttaggcagtgttaaacatttgtatcatactcagattcaggggatcagaaaattttagagctgaaggtgtctttagaaatcaactcatcgagtttttacactgaactcagaaagcagttagcctggagagaaggcttattcaaggtaacagtcaaggcagaacttgctatgtgcccaagatgctgagcactctctgaagatcttcctgttttcaggaatggctgctaagtggtgagatgagatgtgaatgcagggactgcagctctggagcctgactcttaaccactatgcagtagtcattagggaagcactgggtttttgcagccagacctcctgaccccgctccagtgtttttccacaatcccacccagctttctatcttgccttactccagcccactgtgcatacaactgctaggacaatctctgtaaagtacaaccctcatcataatattttctgcttacaaacctgcaatcactttctcttgctgactgaggttagtacaaattcctcactttgtattgaatgtctgtgacaaaaatttctagtcttgtttcttagagtttccttgcactcctaaactcttaaaccaaacttggctgcaaacacttctctaaaaggagcctgtttcttctgccttttcccaagctgtttcctagacctggagagccctccttccctttcctttagaatagtctaaaagtccctttatttttcttttttcttgttcttctaatagatataatttaatgtgccagaggctgctgattgcctgtcaatatctattttccctttcaccttttagaaatagaatctttgagttttgctagtcatatagctccttggaatgaaggcgtttcccagcttccatcataactcagtgtccaaggagctgtgaccagaagcaaggtgtacaacaactgcgtcacacctaagagaaggaagtacgtcttccctctccttctccctctttccactagatgaaatacagaccaaggtggtgtgttggggagctatacagtctttagccatgcagataaaggcaacaacatgagacagcagagccgagagttagatggaacctgggccccaacaaaatggacctgtcatataagccctggactccctgtgctcagaccattaagtatgaggaaaaaatatttctatcttgtttaattctctggttttggtatttcttggctgtctttgttacagtagccaatctgtatccttagaaatacattcttatgatgagttcatgtcctttgcaggagcatggatgaagctagaagccatcattctcagcaaactaacacaggaacagaaaaccaaacaccgcatgttctcactcataagtgggagttgaacaatgagaacacttggacacagggaggggaacatcacacaccagggcctgtcaggggttggggggcaagggagggagaacattagtacaagtacctaatgcatgcggggctgaagacctagatcatgagttgataggtgcagcaaaccaccatggcacatgtatacctatgtagcaaacatgcacattctgcacatgtatcccagaacttgaagaacttaaagtaaaaaaagaaaagaaaagaaatatagtctcacttctttgatcatctacacccctctgagtttttcctaaaggatttcttaaatttaccatgtagcagagtaaacatggaatttgaagctagatagccctggctttgaatcccagctccaccacttctcagctgggtggctccagcctacttgcttagtctctctgagcttcagtttctttacctgcaagcactgaagacaacagtccatggagtaactttccactattctgagctgcctctctagggtgattttcatctggctgtgtggacctcatgagtcactcttctccactataggaaaataccaaccacagaaaccaaaatgttcacatctgctactcaggcaccctctcccacgaagcaagctggaaatgctgacacattctgcagctctcccttggctgtaatctgggcagaccatcacccctctgtttgtagatgcaaggctatgattcacccttcctcaatccaattccttacataaagagattattataattccaaattcccagcttattcttcatacactcatagatgcttagagttacaaggcacttgagggtcttgtggtccaatcttccctctgaaatcagtgcggccctggtgaggacttcctccacagcctgtctcaccaacaggcatcttgcctctgctgaatgtgcctacttgtcacatggcagcctgttctattttttgacagcaaaatcattataagtttcttcctgatacctttatttagtcccatttctggaaggctcattacttaaaaatgttaacccaggatggaataattcagagactgtgctctacagagctaatctaatttcttgtatacatctttattgatgtcaattttgggagacttatcttcatcatcttcttcatcttctactatctcacacatggctagtggttttcaaatgtttctaatcaagcatctctatcagtaaatactttttgagcatgtctctccaaacatatccatacttatttatataataatatatgtattactgtgttagcattttagaaaatgaatgagacacatataaaaatagatattaaagatgataagaaaaatgtaaatgtgagttcaaatagttcctgctcgcatttcaagggatcatcttgcacatcccctgggctgcagatctctctctttggaaatgactgagctattcatgatgcccctcctcaccagcatacaagccctatatgaggacagagattctgtcttatgttctctgttgtgcccggtgcttagaacaatgtctggcttagaacagtatctggtgcacaggacacattctgtaacttttttttaatcaatcagtgattcccagatctttatttatagcacagattcttcatttccaactgtctacaagacagcttcacctggatctcctcaggtatttcaaacccaacacacacccagctgaactcttcatctctagtgtcttcccccaccaaagtgtcatcatttgattctcactgcctacttcacacctgtcccccatgtcgctaaactggttgacattaaacacacaactgactgatctcactttaaattaaagaccatacatctcaggtggacagcctccattgctcctcaattcaaatacatcttctatcccacttcctctcctgatctcgtggctaattcgccatatctccttcccacttctcaaaacttcagcacccttctacttccttactatcagctgaatatttttctgagaaaataagaacaactgaagaggacttctgttggtaggaccaaatccaccacacttcaagcacctgagtccctatgttctccttttcctcctcttccagtgagtgagattgtacctattcctaagactaacctctctctacttgtgcactgtctctcctgctcactcaaagctttgatgcctacgattcattcctctttgtcctgcatcattaatttccccctttctactgaatattttccatctgcacataaacatgctctaaaaaaaaatgaagtaaaatccttttgactcctctcagcccccacccaggtctcatttgcttctcgtacacttttaatgccaagatttttgaaagtagtgccaagatttttaaaagtcgtttgtagtcgttatcttcacttgcctacctcccattctttcttctgtttgtcattaccactttgccaacatggctattgtctaggttaccaatgatctccattttaccatgtccagtggtcaattttctggacatattttactggatctttcagcagcattttgcacataagatcacttcttcctacttgaaacaatttcttggcatttgagacaccatgctcttgaatttttcccaccagcagctccgtctcagtctccttcactggctgctcctcctccatttaactactgtatcttgagtggccaaggatccgtccgggtctacgttcactttcctatccatatacagcaacctgggtaatatcatccaagcttgtgatgtcaagtatgttcaaagttatatttcatcccaaaccctacccatgaacttcagacttgggtatccagccacctctcctcttgggtgttcagaagactttccacatgtaatatgtctgaaacaaaacctttgatttcctcctccacctccttaagtcctattcctctcaaacacttctcaagctcagtaaatggaaccaacacccacctgttctcaggtgaagaacccaagagtaattctcaattcctgtttttccccacatccaatccatcagcaaatcctaatttttctatccttaaaaagatgaaaagacaactgccttctcaggactttcactgtgacaacccaagtctcagccaccatcttcttttgcctctgtgtctctgaaatttgttctattccccagaaccagagtgatttaaaaggacaacaaaaacataagtcaaattatgtctctttcctgctcaaacccattcaatggcttcccatcacttagattaaaatccacactcacggccaggtgtggtgcctcacgcctctaatcccagcacttcgggaggctgaggcaggcggatcacttgaggtcagaagttagagatcatcctggccaacatggtaaaatcccatctctactaaaaatacaaaaattagccggacgtggtggtgggcacctgtaatcccagttacttgggaagctgaggcagaagaattgcttgaacctgggaggtggaggttgaagtgaactgagatcttaccactgcactccagcctgggtgacagagtgaaactccgtctcaataaataaataaatataaaaaataaaatccacacttactattatggtggtcaaggctataagaatccagcccctgcctacttttctccttttcgttgtttgttgaacaagactctcttgttttagtagaggttctatatgctcactatcccctttgcctggatatcttctccccaggacttctcatggctttctccattagtctctgctctaacatcacctcctcagaaaagtctgtctcctgcataaaataaacattgtgccccatccttatatcatgctttactcttcttcagaaagcttctcacaagctgaaattacattatctcttgatatatttactgacagtcctccagttgaacgtaaggtcctgaaattagggcttttaaaattttgttcaaagctgtattcccagtgcctcgattagtatctagtacataataggctctcaatacacatttcttgggtgaatttatatgtttacctcaattacccaagaagaaacataggcagtcattctagtttttttctgctcaagacattttcttctcccacaacatgggtcagcaagtcctttggcctactctcccaacatctcttaaatccatcctctcttgtcctccaattcccatccttcccacaatttttttctctataccatttccagagaggtcttaaaacataagtccaattggatctctcttctgcttaagaggcttcagtagctctccatcacctgaagaaggaagcccaaactccatactatgatgtgatctggagtctgtctgtatttccaacctggtttcatgtcactcctttttccacatatgtcctatgtacccagacaatttgcatccattgaacccaggctacttgaagttcccacatgaaaacattcttttgcttacactgttccctctacttgagtgcttttctctctttttaaagcctgaccaagtactacttattctttaagcacaaaatcacctcttcccaatttctgaaagcaaagaggattcaccctctgtgttctcaaaaaaccatacctggttagtatttttatggttgttgttgttttacctgaatgtcttattcagtcacttatttattcaaaaaataagtatattcttattgagcaactactatatgctaggcactatcctaggcactagggatacagttggatacaaaacaggtaaaacatttgctttcaagaagcaaagggatggtctggcatggtggcttatgtctgtagtcccagcactttgggcagctgaggtgggcagatcatctgaggataggagttcgagaccagcctggccaacatggtgaaattctgtctctactaaagatacaaaaattagctgggcatggtggcatgcgcttgtaatcccagctacttgggaggctgaggcagagaatcgcttgaacctgggaggtggaggttacagtgagcagagattgcgccactgtactgcagcctgggagacagagcgagactctatctcaaaaaaaaaaaaaaaaaaaaaagaagcaaaagaagcaaagaagcaaagcggagtcagacagtgaaaaataattaaaatacacaatgattagatgatgctaagtgcaatgaaatacaataattcagagacggagcacatggaggctcccacatgggtggaagctgtcatactgactagggcactggggaaggcttcactggaatgacatttgagttaaatcccgagcaggtgaggagcatctggggatgagtattctcggccaaaaatatagcaaatgaagaaccattgatgtgggagtgggcttggcctgatttagcaaaagcacaaaggccactgtgcttggagcagagagaacaagggaaagagaagcataagatggggtcagagagtagcaatggaaaccttgagtttgtggcatgagtgaggtggggcgtgttggaggatactgagcagaaaggggtgtgggctcacgcatgtttaaacagcatcctgtgtcctgaagagaagggtgaatgcagggagaccagggaggaggctcctgccataggccaggcaaagtactatagcggctcgggccaggatggttgtccttattagacttgagtgacttgaaatctgggactagatcccatttatgttttaacctccagcatccagcacagtgcaccacacacaacacaataggtgctcaaaggcactgaataaacaaataaggcacgttgtctcagcaagcagctacagcttctgaagtcagcactgtttgtttttctagggccatgtcttagtctgctttgtgttgctataaaagaatgtctgagactgggtaatttataaagagaagaagtttacctagcccttggttctgcaggctgagaagtgctaggccatggccctggctttccacaaggggtgtcatgctactttacaacctggcgaacaacagtaaggagaagcagacatgaggaagagggagaaacctgagggatgtcctggctttgtaacaacaccctcttgaggaactaatctatttctgggagaactaatccagtcttgagagagtgagaactcactcacaaacatgagaacagcaccaagccattcataagggatccacccccatggcacaaataccttccactagctcccaacccccgacgctgccacagtagggatcaaatctcaacatgagctttggtggcaacaaacgaaccatatccaaaccattgcaggagagattttgtgacattttgtttccagtaggcaagcttcatcttctgtgtttcctaattgaatggcccttaggccacattctgaggacagcgtgggtgtttgcatgagggccaacacaatcaaaacttgatgattgtgaaattgtttttctttaaattacctttggacatttgaaaaatgtgtttcaaaaaataagtaaaaaccacccattctccaaggcgggctgccttagctaattgagtgcctcaagaccccaggtgcatcctagaacgctgtccaaacctgtctgaaacccaaatcaagtctttgatggtcaatgtctgtctttctagttctaatttaaagataaaaaaatacctgtaatcccagcactttgggaggctgaggtgggcagatcacttgaggccaagagttcgagaccagcctagctaacatgaagaaaccctgtctctactaaaaatacagaaaatctagccaggcatggtggtgcacgactgtagtttcagctacttgggaggctgaggcaggagaatcgcttgaacccaagaggtggggctgcagtgagccaagatctcaagactccgtctcaaaaaaataaaaaaataaatcttcattaaaaaaaatccaaatcaacatttggataaggtaatttgagaaggatttattagcatgtgaatttatgtatttatttatttatttttaagaaagagaaatgtacagagagatggcgggagagcagtctggtagcagttctttaaactctctgtaaagctggatggttatatgatttctcagagttgctgcagggctttgatgagataatatcactaaaatgccttggaccaagcctaccatagagtgacactcaagaaatgttagtcccagcattttcccttaacaattgcctcttcccctaacaattctctcagctgtttgccagggatctgaatgtcctgggtccaccaggcttctcagtctgacaagatcacttttctcatctggtaacctcaaggctacaagatgagttttacgggccctttccttcataatgtgatatcaatttttacatgatttttgatataactttaaattcttcaacattgtatttaatttttattttagacaaagtctaaattttcttagaccttgaaaatttcatttttttagatgtgagcaataatgcaaaattttttaaccctaaagttttgttgttttccttcttgattttaaaataaactcacacatttttgtgggtccctaagagtaccatggaccctgggcactgcgtctaatgagaaataatggaaagagaaacaaaaatgtgaagaacaaagtccagcaactcaaagttgctcaaggaagggatattgcttctgtgggaagttttactcgtccctcaaatgggttttcctggctctttgactcttcaatcccttccagaggacaataataagatttgttctttgaaactgaaggaaaaccataaacggttggtgactgggttggtgaacattagctaatgtgaaacagagcacaggacttgtctaacaaggaatttgcatattctcatccacgtagcctggtgtaggttctgcctggggccatgggtaatgaatgcctgcacagcctctccagactgtcaagggagccacttgcacccaaaacctaacctcaggggcctccaggcagatcaggagagcaggtcattcaccactcacgaggacaaaacgaactgactcagccttcttttgggggtaggggattgattcctggaccattagggagtgtttaaaagagattaattggccactggtgggaccactccagtcactttccaggcaagacagggctaccttcagcatctctagtgaaagtggtgaattagcacttcagaagtgagatggcatggacagaagcttctggggctgagctcaccattggaagcttctttccagcttcctgaaggtctctggaggtctcttcttaccggggaggatgatccctggtggctccctgctgacattcttcaaaactcggctatttccccagtgtcctgctgataaaacagaagaggaaatgatgaaagtaggttgctctattattaactcatcttttaatttcagttcgtttgttttagtatgtttcttgatgctaggcatgacacccattcattcattcatttattcattaaacaaatgtttatcaatgatatgtgacattctaggcactattctagacattctaggcactattctagacatttagaatacagcagtgaacaaaataaagatccctaccagtgtgaagcaaacattctagaggggaaaaaaggcaagaaacaataacacaacagcacagtttattgtctctaagatggcagtgatacaagatgcactgctagtctatgtgccactaaagaaagaaagaatgctgctaataaattgctgccattatagaatgcatcttgattttatgtatgttaagatgtgaaacttagaattgattacataagataaataaactataatatatcaaaatgtggctatgaaaaaagtgaagctgggaggggagtggtgatattgaacaaaggcttgaaagaaatgggactgttaaattaatggcaactatttttgcaaaactgctttattgagatgtaatttatatataataaaactcacccttttaagtgtataatccattttagtaaggttacagagttacacaaacatgatctagattaccatgatctagatttataatatttctttcttttttttaaaaaaaagaacacgtaacaggagatctatctcttaacaaatttttaagtgtacaatacagtgttgttaaccagagtcacaattttgtacagcagatctccagaacttaatcatcttgaataactaaaactttataacccttgaataatacctttccatttatactgccccatcccctagcaaccaccattctactctgtttctatgtgtttgactttagatacatttagatacttatgtaagtggaattatgcagtgtttgtccttttgtgactggcttatttcacttagcataatgtcctccaggctcttccatgttgtagcatatggtagaatttttttaaagctgaataatattctactgcatgtgcagtatgccacattctctttatccattcatccagcaatgaacatttgggtggtttccacctcttggctactgtgaataatgctgaaattaacatgggagtgcagatatctctttgaggtcctgatttcaaatcttttggataaatcccccaaatgggattgttagatcatatagtacttctattttgattttttcatgaacctccatactgttttctatagcaattgcaccattttacattcctaccacagtgtgccaggatttcagtttctcaacagcttagccaacacttatctttgtttttttttttttttggtttttttttttggataatagacatcctaacagctgtgagatgatatctcattgtagttttgattgtattttcctgatgactagtgatgttgagtaccttttcatatacctattggaatggcagctatttattgaacaactatgatatccaagagggcagatatcatttgtttaccactgtgtccccactgctaaagcatctggcacatggtaggtactcaataaacatttgttgaatgaatgagctactattcatatatgccaggtacttcacagtgaattcttatcaaatgtttggaggtaagcatggtcatgcctattttatgaacggtgaaactgaggctcagaaaagtaacttgttcctggtcacaaacccaggtgaggagaatatagtacttgaacccaggtctctctgatgttaacatgtaaactcttcctctacatctcactggcttctctgcttctggccattttaatatccctctggtacaaaaataaaaataaaaaaaaattggaacaccaggcaagcaggggctttggataaaaatcagactcatagaaaccagaatgaaacctttgggaatagaaagcccaattcactgcctgggaaatgtcacattttgtggaggtgcaagcagttggcttgttatctcagatctcaagttctagctactttcactttaaaatctattatttgagtgaattaagactccctgcctccaaagagacgattttttttagtaaaaactctcccttgttaaacagtttaactcaaactggcagcataactgttaaaaacaaacttactttgatactttgcaaagcataaggccaaataacaatggacatggaaacccaccacagtctttctaagactaagtcaaacatcctatatatagaaaaacatcttgggtaaaatctgttaagccaatattggctgaattcaaaattacacctaatttgaaacaactgctttttcctcagccaactggctaccctattgttctttaataaaaataacagaaaatccaaatttgaagtcaagttctccccgaagaaagatacgtttcatattaaaaggctctactggtgacacttgtgatatgagctggggtctccattgtctatcctggtagagtgggaagattatcagtggttaggcaaggtccctaaaaacttgaaatttttgctacaaacacgagggaataattaaacttggttggaataaacaaacttttggggcagtccaggcagagatcagaattctcaaaatccaaaggcctttgttgtgttttattcataacctgctcagaggaaagccgaaaatggatcctatataccatgagctcattccttttttttttttttttttttttttgagacagagtttctctctgtcacccaggctgcagtgcagcggtgtgatcttggctcactgcaagctccgcctcccaggctcaagcaattcttgtacctcagcttcctgaagagctgggactacaggtatgtgtgccacaacacccggctaatttttgtatttttagtagagacagggtttcaccatgttggccaggctggtcttgaactcctgacctcaggtgatctgctcgtcttggcctcccaaagtgctaggattacagatgtgagccaccgcacctggcttcattatttctcattgaggcaaaatgttccattgtatgagtagatcaaagtttacttgtacatttctctgttggtggacatttgggtttcttctagttttgagacattaagtgaagcagtagttaccagctaggggctgggcctattagtctgttttcatgagtctgttttcacgctgctggtaaagacatacccaagacagggaagaaaaagaggtttaattggacttacagttccacatggctgaggaggcctcagaatcatgatgggaggcaaaaggcacttcttacatggtgtcagtaggagaaaaatgaggaagaagcaaaagcagaaacccctgataaacctgtcagatcttgtgagacttattcactatcatgagaatagcacgggaaagactggctcccatgattcaatttcttccccctgggtccctcccacaacacatgggaattctgggagatagaattcaagttgggatttggatggggacacagccagactatatcattccacccctggcccctccaaatctcatgttctcacatttcaaaaccaattatgccttcccaacagtcccccaaagtcttaactcatttcagctttaacccaaaagtccatagtccaaagtctcctctgagacaagggaagttcctccacatatgagctggcaaaatcaaaagcaagctagttacttcctagatacaatggaaaaacaggtattgggtaaatacattcattccaaatgggagaaattggccaaaacaaaggggttacagggcccatgcaagtccgaaatccagtgaggtcgtcaaattttaaagctccaaaatgatctcctttgactccaggtctcacatccaggtcatgctaattcaaaaggtgggttcccatggtcttgggcagctccacccctgtggctttgcaggatacagcctctctcccactgctttcacgggcaggcattgtgtgtccgtggcttttccaggtgcacagtgcaagctgcctgtggatctaccattctggggtctggatgacggtggccgtcttctcacagctccactaggcggtgccccagtagggactctgtgtgggggctccgaccccacatttcccttctgcacttccctaggagaggttcttcatgaggccctgctcctgcagcaaacttttgtctgggcatccaggcatttctatacatcttctgaaatctaagtggagattcccgaacctcaattcttgacttctgtggactgcaggctcaacaccatgtggaagctgccaaggcttggggtttgcacactctgaagccacagcccaagctctatgttggcccctttcagccacatctggagcagctgggacacagggcaccaagtttctaggctgcacacagcacagggaccctgggactggcccatgagaccactttttcctcctgggactccaggcctgcgatgagaggggctgctgtgaaggtctctgacttggcctggagacattttccccacagtcttggggattaatattagactccttgctacttatgcaaatttctgcagctggcttgaatttctcctcaaaaaatgggtttttctattctactgcatcatcaggctgcaaacgttctgaacttttacgctctgttttccttttaaaatggaatgcttttaacagcacccaagtcacctcttgaatgctttgctgcttagaagtttcttctaccagacaccctaaatcatctctcccaagctcaaagttccacacatctctagggcaggggcaaaatgccgccagtctttttgctaaaacatagcaaaagtcgcctttgctccagttcccaacaagttccccatctccatctgagaccacctcagcctggaccttattgttcatatcactattagcatttttgtcaaagccattcaacaggtctctaggaagttccaaactttcccacgttttcctgtcttcttctgaggcctccaaactgttccaaactctgcctgttacccagttccaaagtcgcttccacattttcagctatcttttcagcaacgccccactgtactgataccaactgactgtattagtctgttttcacgctgctgataaagacatacctgacactgggaaggaaaagaggtttaattggacttacagttccacatggctggggaggcctcagaaacatggcgggaggcaaaaggcacttctcacatggcagtggcaagagaaaaatgaggaagaagcaaaggcggaaacccctgaaaaacccatcagatctcatgtgacttactcactattacgagactagcatgggaaagaccagcccccatgattcaattacctccccctgggtccctcccgtgacacatgggaattctgggagatacaattcaagttgagatttggatggggacacagccaaaccatatcactgggggaggaaggcaccgtggtagtgctatggaccgaatcatgtcccctccatattcgtatgctgaggccttgagccccaatgtgaatatatttggagatgagtcctttctggaagtaattaaggttaaatgaggtcataaggttagggccctgatctgatagaatttatgtccttttaagaatagacaccagagcgcttgctccaggtgcacaaagtagtggccatgtgagcatacactgagaaagcagccatctgcaagccaggaagagggcccttaccagccattctagtcccctgatcttggacatccagcttccaaaactgtgagaaaccgatttttgttattgaaatcgcttagcctttggtattttgttctggcaccctggcagactaatataagtaggggtaagcaggttattaaccagaaagagacacaaaggagcttttcacataagggcgatggatatattctgtatcttgatcagggtagtagttacgtgggtggatacataggtgaacaagtttatcaaactgtcagtttcagatttctacattcttgtgcatataaattttcctaaacttgaaaaaggccgtcttatccccatctttcccaatggaatctgtgtttcaaaaagataacaatatagtgttcatgccttcaaacaggcctggtagaaaggaaattaacatacattatttatctcgtatatatgtatgtttctgcctgtaataaataatggggattgagcacttagcacaagagtaagcaactgccaaatgcagctctgggttcagacctgtatggggcagacctgagagccaggcccctttccctaccatactgaaactgacagcaaagccgctcagctaaggggatgtgcagaaaggacgccctggggtctcctgaggctgcagggcggccggggagccctggggtcaggagggcaactttctggggcacagtgctcgagtcacctctccgaggaacggctctgcctgcactgcttcttgtactttgtttacccgcccctaggaaaagagctgtgaagatgatcgtagggagcaagcagtgaggcggcaaatggctctgagaggagccacgcagacagctgggcagccgtgccaagaacaacaggaagctcgcggccccacccctgctcgctgcagccctggcctggagacccagggttatttgctttgaagggccctctgcagatgttacataaacaaaacctccattgactccagttctgagcctggcctaaaatagcccgcgggcttccccctaccactgtgcagtttcgccgccatcccttttggtccccttgtgtgctagctgcttccctccattgaccacatgtgcagacaactctcgccagtgtccctaagaggccagttccctggggaacaaaaagtggggctcgtttgccttccctggcaggtcagacacaaagcatccctgtaagacctttgatggctactggccaagggacacgtttcccctccccagggaggcaggaagctgggctgaggcacagtggggtttggtcagcagccagcacaagagggactgtgctttctctctgtgtctgtgtctctttctgtgtgtgtctgcgtctctctctctctctgtctctttctctctctttcctaagggcaagctctccaggtaagggcacgagttcttcgtcagcgtctctattttcacttgatgtaacgactgaacactctactcttgactcttcctccaagctcctataaaattccctgaccccatttgcacttcagctccttcattctgcagaaaaccattccttcgtgaacatctggagaatcacagatccgtgccacagcacggggtcactctgggccttgccactcaacatgggtccctggaagctattatcatcttttccctttgacctcctgcacttctccaggatcttaactcataaaataaaaccaaaaacaacaccagcaataaaaacatatttatgtcaaatacttactatgtgcctgatacaaggctaagcattttatgtgttttattttatttcatattgaacagtcttatgagattggtacaataattatctccagctgacagaaggacaaactgcagtttggaaaaattatagaacttgtacaagatgtgacagaggtggaacagtcagacttgtattcagtgtctcaaccactgcattgcatgtccggggaaaaagagggcaggactcacaactcctcctttccatggtctttcttctattcaaaggccatgctattgtatccatggtcaatgtcattaaacatatcactgatcaattaattatccaatcagtatttaaggactatgttttctgggcaagttgctatttgagtctataccagaccaaaaaaacaaaaacgtatgatgtatactatgtgaatatctagctcctactgtatcaacagttgtacttcggttgtgagagggctttgtgtttctctgggctgaagatcctcaaaccagatggccatcctggaactagaagttcttctttaatttaatttttttttaatttcaacttttatttgagataccagaggtatatgtgcaggttcgttatgtgggaatattgcatgaggctgaggtttggagtatggatcctgtcacttatgtagtgagcatagtacccgataaatagttaattgctgccccccatcccccactgtctagtagtccacagtatccattgttcccatatttatgtccatgtgtgctcagtgtttagctcccacttataaatttggttttctgtttctacattaatttgcttaagattatggcatccagctgcatacatgttgctgcaaaggacatgatttcattcttttttatggctgcatagtattccaaatgtgtgtatataccacattttctttatgcagtcttaccactgttgggcacgtgggttggttccaagtctttgttattgtgaatagcacagcggtgaacatacaagtgcatgtgtctttttggaagaataattttgttttctttgggcatattttcctttgagcaagcccagtaatgggattgcagggttgaatggaactagaagtcctaccaacttacaggagggaagatgggaaggaacggaagcaatatggagagctttgaggatccgtggaacaagaggatacttcagaaagacccacactcaggcaaggggctggagccaggctgtggtgacccagcaaggggctaatggagcctgggaaaccctggcatgctgaggagtttagttcagatccacattctcttcactctgggggctcctgtgagactggctctcaaatgaagcccccggggctgagtcggctttccctttggaccaagtcaaagccttcctttatctttagaaaaaagtcttactcctgtggggttcccctggttttattgtctattcacttgttttattcatccacccgtgtccattcattctagaaacatttcgtgagcatccactatgtgctaatactaggtaccagggttacagaaatgaattttaaatgtaatggaatatggtcccggccttccaggagttcgtactgtaacataggagagagagaagtagttatgctgcaggatgataaggccagctatgaatgtaactgcaggcttggaaagcccctgagctggttggcctgccaggtgctgaggaagtgtgagtgcccacctgttcctgtgcagagggaaggagggtgaatgtccacagagacctccagaagagattgctggtggatgcttacttccttctcttgagcttccttctctgtgaaaagatctccactagaggaaactggccactgtttacctcttttactcatctccccaggagatgaggaatggcttatctgattggagagttagttccagagagggagctaggacagagtggctctggtttttccctggtggagatcatttccttctactgctctgtgtcataaactttacagaggttggctgtggccaggaaggtgctgcttgtagcccagtgaatgagtttagttcaagagaagatattgaaacgtccacctagctaagatattgaaagccacattctccagcctgacttttatcaatattgtcgatttggatcttcatttgcctgattcctgtaacagagacaaaatgtactgtttattggactccctcaaactccgtcatacatgacacttatgtgtgtgacagggatggactcagctctctgcctgactgggagtcatctacatcccttgtgctaagctctgcagagagaggaggcacattttcagggacttccctgcctcattccttgcttgaaagcttccttctgaccccactctgcagcaagaaaggaaaaagaacttccaggatgaaaacagaaaatctggatcgtccctttttcagagtctgtggcagttctacaaaggtccatgaatagtctttggtctgagcctggaatgcccactgatgtcccagataagactctgcctggctgcctgctgtcctctagggctgtctttattttggaaggggcccttctgtcaatgtgttctggcttggctttcaggaacacctttgccctgttgtttctgatgcttgacttcccgtggactgaacttgggatcgtatttttccctagaagaatatgctgtaaccgtattatcctgtaacccttagaaggcaggtcaggattactgccccttttttctcagaagacagattactaagatgccaaaagggacctaaggtagggaaacacccaaacaggattggcaaaaacccagagggccccatgtatacatcccttagtattctcgcatcagacaatgccattttcgccttcattctatcagctggttcctcaacagctaactgggctggttcttttctcccaaattggacaccaaaagcttcagagtaagcaatagcccagtagagggagctgtgttaaacaagatttccaagctaaagggtaaaatacaatcagccaagcaggtagccctgtgtataattcggaaacttgtatgttaatggatggttgcctattcgaaagctctgagccagaacacagcttttgcaaggtggtgccttgcgttttgtgggttgctcaggatcatgcatcttgcttccatcagcagagcatgatcttggctccacatggcaattccatggttagacaggtttgtagcttccacaggtagccttggctctgggagcgggagggaagtgggcagggtcctctgaccttgcacataccaggcagcgctcatgctcacggtctcaggagatagattctgtgtcacagaaacctataacttaggggagttattagtgacaagctttgagggctctggctaggaaggagatgcagtgaaaggagaatctttcacaaatatttggagcttctgttcacctaactcatctagctgcccgtggggtctcagactgggctaagttcaaatctagggcagcccttggtacaatttcattgaataaacctctgtgatcaagagaattatgaaatgtggaaaatatcaaggaaagcaacatgtactgtgtgcgtgtgtgtgtgtgtgtgcatgctttggtgtgtgtttgagtttgcctgagaacaggagtttccacaattaatcttggatcatgaaagatatctatggcagagataagagagctagcaaactagcatccttaaggactcagcagatgcctacaggttaaaaattcatgcagacctgttgggaaataagagagaaatgagatggtacgtgaggtgactttactatgtgcatttgtttgctggggcctgtcgtcacaaaataccacagattgggaggctgaaacaacagatatttactttctcacagttctgaaggctggaagtccaagaccaaagtgcctgttggtttcttctgaggcctctcagttggcttgtagatggctgacctcttgctgcctctttgaggtcatccctctgtgcacaccagccctggcatctttctcttcttataaggacacagtcatattggattaatgccccaccctaatgacctcagcgtaatcacttccttagaccttttctccaagtatggttacattctggaatatgccggctggggaggggtggggtgggttggaacttcaacacatgaattttgggggaaacagattcagcccataacactgtgtatgtctatggggacaaagaattgtactgattaaggtaaattatgttagttgttataactgataaattctgaagtcttagagcataatacaaacaaaatctatttttcactcccatgaaagtccatttcaatcggccagtctatggctgtagaaaatgcagtcattcccagacctacctgccatcttcaacacatgttgtgtccatggatattttgaaaggagaagtcagaaggaaagtatggacaaggcaaaagactctcaatggccttcacccagaagtgacacattacttccacttacactgcatcagcaggagctggtcttatgcatgcatctagaggaaaggggtctgggcaatgtaatttgcatctaagcccaggaagggaaagtgggttaggtaaacatctagtcaatctttgcagggatgaagtaagcttggccagctgagttctaaagatgggccgggtgttctggggaactagtcagcaggtactagaaagtcaagtaaacattcattaaagaacccttcgaggttcccaaagtcatgacggaccttggtcttgggtggtgttccccaacctctttcatgtcatggcacacataggaaaggatcattcttgtgctgtatattagactctctggatgaagttattcaaggccagaggtgatacatgaattaggaggccccatgcactccaggtggccacctggccactgtgaaggctgaggatcttatggcatttgccatttaagatgtccagggttaatggctggtaacctgtttgcaacatactggtgtgctgcagcttacaggtgggaatgttgaggtctagagaacaaagcaagtaacatgtggattagatgtgcattctgtgaagaccaaacctactgccaccatcatgggataaaacaaaaagggaaaccaggtgctctaaaagccaaggacagcagaattgtcctgaaggattctgcaagataataaagcatagggaccacagattttcccttcatctgcagtccgcgctcttaaaactagtgagttttaattatgttatatttgtagcaactctttcttctctctctggagtaattaattggaagagaattacaaaggaaacccagacatgggtagtaatattcatcagaggacacaacagaggaaagaaaatagaacataggctcttgaacattttaacataggttcaagattttaacatttatatactgtctttggtttggtttaaatcatatccactgtgaactaacaaatatttcatgttatctataaataactcagtgagtgcttacaaattatagggcaatatagttagatcacaatgtggcagagtggctgaaggccaattagaaagctcatatgcttttaacaaacaccccaccgaaagaaatcaatttacatcccgtgattattgcaccatcagagaatctttgcaatgttattaaccctggacatcctaaattacaaatggagataacacttaaaattgattagcagtgtattttgagataaaatggtgtttttgccttgctaatcacctctttcacagaaattattcttgctttccatgaagttatgaaaaataaattggagaaatcttttattaagattttaaaagcaaacaaataactttcaggataatattcaaatcctttgtaatttcctttctccattttcatcaactgtgggaatgcttaaccacacaggaagaagttggtggacttggaaagttgctgaattctcttatttgaatcaatccacattaaacacaagctattgttttattagcaagtgaaagataaacatagcttacactgagtggatatggaagagaaattggtttcctctagcccagtgatccttgaacaaatgaatgattctgacagaaacctaaggagagaagattttcctgagattgggtggaaacaaaccattcatgtatcgaatcccttgtcacccacaaaatccagcctaccaggttcactagctccttaaatctatgtaccactaggggtgcatgagacaattttaaatggcataaagaagaacagcttattattaacaggaatgttcttaaattaatgtatgttaataaaaatatacccaacacagtgaaaccatgatttcatcaataatagtatctaaaatgagaataaatatatatgttacaaaaaaggaggtaaataaaaatattaaatatgattgggatgggtgaggtggctcacatctgtaatcccagcactttgggatgccgaggtgggtggatcacttgaggccaggagttcgagaccagcctggccaacatagtgaaaccccgtttctactaaaaatacaaaaacttagccgagcctggtgatgcatgtaatcgcagctactcgggaggctgaggcttgagaatcacttgaccccaggagatagaggttgcagtgagccaagatcgcaccactacactccagtctggatgtccgagtaagattctgtctcaaaaaaaaaaaaaaaaaaaagttaggtacagttgatcttcactattcatagattcagtatttgtgaatttgccaacttgctaaaatgtatctgtaactccaaagtcagtatgtgcagtggttttgctattgtttgcagacatgtgtggagcagcaaaacatttgagttgccatctatacaagttttcagctgaggcccagcaaggtaatgctctattttgttcagctctcatactgtaaacaagtgtctataatcaagtgattgatttagtgccatgttttttgcatttctgcctttttttgggtaatttcactgttaaaatgacccccacatgtagagccacagtactctctagctttcctaagtgcaggaaagctgtgatgtgccttagggagaacctacatgtattagacactcttccttcaggcatagttacagtgtgatattggtcatgagttcaatgccactgagtcaacaatatgtattaaataaggtgtctttaaatggaaacacatataaagaaggtcatgtattgactgactgatgaaaatgttatgaccagaggctcacaggtatctaaccctgtatttcacctgggagcaatggttcagtatttgctaattcagtatttgcagagatgttatagaatataactagtgtgaataatgagaactgaccatgaatagatgtcgaggtgcttttggtggcacatggagatgtgccacccggatctcctttcaaggagggccttgctgaagccatggggaatgtggtcagcagactgcctccggctggaagctccttcagggtccacctcaactgcagagagccaccctgcccgaggccatgtccttctctgatggtggaacctctaatggggtcccaatccttcctcttgctccagacccccattccatctcattatattggctgaggctttgtcaggcctgcacagcagtttgatttctccttctgctcaatcctacttccttcctgtttcctctgcagtgctagtccctaatgaacatcctatatcccaaccttcatttcagcttccatttctgaagaagctaacccattatagtggttcacagatgtggcaaaatatagagaaacattttgctaagatcctccctcattcctctcctgccctccacagatatcagcttccttgctctcaacttcttggttctggactcttgggttatatccaaattcagacacccacccccagcccagggtcactgctgaaggctgtgaagtctgagtcctgctcaaggacccatttgaggagctgaactgaaatccagcctgtgctccactcattaattcatgggtcctggtgagggatgtgctgcctgagagaaagcctgctggtcctaactggctcccagcagctgtgtggctagctgtggccatggctgtctctgctctgccatccccctgtggcgtggatccccacttcccgctcctaccctctggacccctgctctcctgagcagtgttggcctttgtcgttgttgcctcttgccactgcaccttccattgtttggactcttcatttgggccttctcatcttttctgcccccaagaggaggtgatctgagctaagcacaaaaacatttcaatttctaagcctttggaaaggttttcccttcagatagagtgctcgtaccagaaagcacccactagagagagctcacattttcactccctcccaacctctctgaatcatgtgtgtcttctggacactaaaataaagactgtgcaacctcttgccggaatgtgcctccaaagatctgagagaaatttgtaaaaacaatagctaatgtttactgggacttactacatgccaaacactctgccaagtgctttgttttttttttcagctataaatattttttgtttctatagcatttaagagaagcctataaaaagttgttgttaaatcaaatttaagaaaattttacatggaaattttactgaatcctcataggatccataagaggttggtactcacattcccatttaacaagtgaggaaacacaggcttagagaggttaagtaatttgcctcacaccttgaattcagcagagtggggtttcaggtgtgctttcgtctgactccggcactgagtaagcactgtgcttacttctgtgatagtgaaggtcacagaaaagccgggctcagcctgagacaaaggctactgctgccagaaacagcaggaaagacggtgagagccaggctgatgaacaggcctccctttaactcaagttcaaaatcacagtgggatgaaaatctgagcatttgaggttggttggcttcattttaaccatgtgcctaaaaatttgtcatcatttaaagaccatttcctctgcacctgcatccaaaatgcatccagggtccagtgttttaaggaagaattactcagatgctctgttttgcttcttcacaatccatgcattccacttctaatcacgtcgaatttgtggagataatggcctcgagggattgggaggatgaaaatcaggagaagtgaagctgatttctccttgaccatgtggcttcttgaaatttcagggtaggcattaaaagaagtggttggtcgagattaaagactgaactgtgcatcttagctgtaatttatgtcatttcatctgggagaaacataaaaatcaacagcttttaatgaatctctgcttggatgttttgtcactcctcaaagagtctttagaaacacattgaatcccatgcccagattattaggattgaaccttgctgtgagggtatagtgatgagcaacatggctcttatatttctccaatgtttgtcaagaccagtttttgtgaaaaaatgatttattaattattatattaataatctgatgtattagcccatcaatgagtgacctagacagggatgtcggtggcattccaagtgtcagccagacaccccacgctttctatttgcccatccggtatgctgggtgctacagctctggggtcattctccttagagatcttggaattcttgaggccttacatttctagctgccactcacttctcctcagcttgcagacatggccatgctgcatttcactgacccattgcatacgagtccagcccctggggaattgccttaactctcaagcatcttaggaatacactttttcctgttttaaagaagaccctggaaagggcaacaaaaacagaactcatctctaagaatgctggcagtggatcctggaggttaacatcacaagctttggagtcaagcaggcctggattgaaatccttcctcaatcacttactagctgtttggccttggatgagttacttgacttctctataaacgtcaattccccgtctgtaaaatggatataattgtatatgtctcgttctactgttgtgaggatggagtgagattatgcatggaaagcacttcagcattgagaagcactccaaatatgataactgttagtgttatcagaagagaaattcaacatatcagcaaaaactcccatctacaatcttaaaaacattgttaagtgaaagaagccagacacaaaaggccacatgttgtataatcccttatatatgaatgtcaagagtaggcaaatctctagggacagaaaatagattagcaattgcctaaggctggagagttggaggggaatggggagtgactgctagtggttatggtgtttcttttaggagtgattgcaatgttctggaaatagataacagtgatggttgtacaaatttgtgaatacactaaaaaccactgaattgtacacttttaaagaatgtgttttatatatgtgaattatatcttttaaaaagttatatttaaaaaagaactatgtacgatgcagctaaaaccagagactttttaaagctaatttgtttcctggaatctctctacctctccaagcctggaagaaggattaactgtcatctcactggaagactgtgtctctttctaggtaaatcatttgttatatgatgactgcacagtaaatgtcaacccattgcaattttggcatttgtggggatcagtaacatgcagttctcttggcattctacgagggactgctaaacagcctggatttatgagcatgaagagccagcctaccatgcctaaatcagagcttctctgcatcttggttcatttggcagatgttccaggtgataagtgagatgttttcctccatttaaagtgaaaaaaccgaggcaaggaacagaaaaaaagagtctattggattaactgtgactcttttgatgtatcatagccattggttctaactgaaggtgtgtgtgtgtgtgtgtgcacgtgtgtgtgtgtgtatgtgttgggggaatgagtagggtagctttgctaaaagggaagagggaaggagatgtagatgagtcagtgcctactgcaaaactggagtggattaattctggaatttcattgagcatattcaaagcttccaaagtataattttaaaaacgtgttttcagattcacatctcagacagagttgtcagcgctgcttaggaacaatttcttttggtgtgagtaaggttacaagattttgataaaaatattatttcttcatgtttggaatgtctaaacagatttgtggtttttcattttgctttaaaacatgattaaatgtgctttaaaaaaatcaaagccttctgtctgggttttgaatctcttccagatttatagctgcttaatattatatatgtcatgccgattttcttttggttcaatcatgtcaattgagattctttcaaagaaaaaaaggcttattaaaaaaggaattgtttgtccaccacattaagactttaagaaatttatcaagatattgatcaagaacattttatttttaaaattctttgctggagctgctaggcggagtagatacccagaaggagaagctgagggagatctcagggcaggcagagaatcaaagtgaaagtcaatttgagtaagttttccttgggctagcgtgcacacactggactctttaattacctttgtttttatggagaatgtactctccaatgggacttagttgagagtgaaggtagtacatgttgtgctctgtactaagaatctttgagagactaagcaggagaagagaaaatgctcccatatagatgacctgaacacttaacaagcagtaaataacaacagctacacgtattgtccatttactatgttcttgcactcagctgggaatttcattattttccataaagcccaatgatattagtgtgattgtatccattttagagatgaagaaactgatggtctagaaggttaaataactgggcccaaggtcaagtaagggcatggtttatctaaactttgaatcagatctgtttggttcttgcttttgactacatcaaaaacctgacagatggtcttgcaattggaaactgggttaatatcctacttctaaaatcttctactgcttagtttccctattcttagaggaggtctttttttggaagcctagtaaactgctcctcctaatgcctttcactcatgagtgatgcagctgcccaaatcagaaacttgaaagttattccaatgctcccgttttctcagccagcacatggataaatcaagttctagagattccactccttctatttccctgcaatccaccttctctagctctgcatccatgattgcagttcagagtgtgccattttgcagtgctacttatagcagcctcttaattggcatctctgcctccagtcttgccccctccagttcacttcccaagaatgctttcattcccaacagtgatttttcaaaaaaaaaaaaaaaaagtgtaagcaatcctgttcattcactactaaaaaatgttcactctcttttcattacttcaggatgaagttcaagtttcctaagattccttataatgacttcactgatttggttttatccttccagcctcatttattatataacactctctggatcaggagtagacttggttacaagtgacagaaaaatgaaaataacagtggcataaactactagaaagctgattcttttcctttacatatgggtggtatcattcagtcatccagaatccaagttctttctagattatttttccacttccttagccatgtagcttctgtgtcattggctggggtggctgctggaaattgagctctcagatccccatgttaacccgtggaacaaagggaggaccaaagaaagtcatgcccttccctttttgatggtgtccaagaagttccacttaggaactcccatttcgtttccatgtaacttggtcacatggacacatctgttgcaaaagagattgggaaatgtagttattgtttttgtcaaccatttgtccaaaaacaaattggggatcctattctcaaggaaacagtggataaaataaactgaggacaactaacagtctctgatacttccactctcagctgtttgcagtggcctgtagtgaagtggctctttctgcccttgctgtgcgtctcactccaggacctcctgaagagcgctgatcctgcactatacatgtggttcttctcctatgcctcccgacttgtcagagaatttcttgaggacatggatgactgtctggcagcgacagttccaggtttttatttttgtttctttaaatagagccttctgtttagcttaaatgtggaaacataaccatagacgtctgagaatgtgaacacaggttataattctgcgcaagaaacatgcattgcaagagtcccccaactgctgagtcagaggtctgtttgaggaggcgatagttgagttaaggtcagcattaggaaaaggagcaagccacataacaatctggaggaagagccttcttgatagagaattcattaggacaaaggccttgaggcaggaaaagcctttgcattttcagggcagaaggaagcactgtggctagaggctgcaagtgagagagagagtggaagtgtggtagagatggtggggacagacagcgcataaaggcagcacagggtggaagttacaagtaccagctctgggacagagcagttggatgactcatggttctaccacttgctagctggagatctgagtaaggcacttagtctccctgtgccttagttttcccatctgtaaaatggttatagactagtatgaagatcatagactggttgttagatttcaatgagttaacacatacaaagcccttagaacagcacctgggatgtggtgaacactcaatagatccttggcacctacattcttgaccctgctgatgtgcgtctagattcttgctatgcctgtctttccaatattgtacacccaaacctgggctcctattatcttcctgctctctgcatttaattagttgctttctcagtgagggttgggtttgactgcatgtaacagaaaagtcagaatgtatcaggttttatgtgtaaacacataaaaccaattttttctttcaagtagaaatcctgaggcaagcaggccactcagggctgaaatggtgccctgtgcaccttagagacccctagtccctccatcttactttttaaaaaatcatcttcaacttttggcttaagataattgctgaagtttcagccattttgtccacatctcagaatgataaaaacagaaggatggaagaacaaaaaggcatatctgttttaaaaacttttcctgaagccccatcctacaatctttcgccatcacattggacagaattatttatttacatgaccaaacttagctataagaaaggctggcaaatgtagttttcttttccagcctaacacattgcagttcagttactaagaaaaaagaggaggctgggtgcaatggctcacacctgtaatcccagcactgtgagaggccactgtggattacctgaggtcaggagttcaggaccaggctggccaacatggtgaaaccctgcctctactaaaaatacaaaaattagccaggcatggtggcgagcacctgtaatctcagctacttgggaggctgaggcaggcaggagaatggcttgaacctagaaggcagaggttgcagtgagctgagatcctgccactgcactccagcctggatgacagagcgagataccgtctcaaaaaaaaaaaaaaaaaaaaaagaaagaaagaaagaaagaaagaagaggaaaatgtttgttggaagaggcccatctcctttcttgttgcctaaattctaaaccagactctcattctttgtctcctcagccacttccaatgagctttctgcctaaagaattttcatcttcaacacattttacacataatgtgctgtggtttgaatatgtgtgcccctgaaaaatttatacatttaaacctaatctccaatgagatactgttatgaagtggggcttttggggaaatgattaagtcatgaggttagagccctcatgaatgggattattgccttataaaaagaaaactgagggagcttatttgccccttctgctacgtgaggacacatagaaggcgttatctataaggaataggccctgaccagacactaaatctgctagcatcttgatcttggacttagcctccagaacttggggcaataagtttatgttatttataagccactcagtataaggtattttgttatagcagccaaatggactaagacaaagagccttcaattgctcccatttgtatcaagcagagcgcataaactgctgtcctgcaagctgaagcaacccaaagtcatagtttgatactttcatggcattttgaaaaaaaaaatagaatcaaattacttatcgaaatttaacaaaccaaaagttgctctaaaagcttgcatgcttgcatttctttctttcaatagcagaggttctggatccacatttctgaatggcaataattagctgcggctgaataatcagtcactccttggatagggcttgagatttctagtttgcccaaatccccactcttcctcttacctcacaccaagcccactcccctaatttacatttgccacctgtcccctcaaggcattgactttataagtcttgactttataaaatcgaaaactcctattatctgtttaagtcccttccttgatctggtcttcacttacttctctagcaaaatgccccacgattcccttcatgttctctgggatccaacaaactccccacacagcacctctcaactgtaagttctatgaggcccatgtctgtgtttttcatcaatatattcccagcacctgtaatgatgtctcattcataacaaatgctcaataattaatttttaaatgaatccgtgaaccaatacctttcttctattacctccctgcctttgttcatgttgttctcagtccctaaaatgatggggtgttttgttttgttttgtttttaagatacagggttttgctctatcaccccaggctggagtgcagtggccctccatactaaccctcccaagttgctgggactataggcatgtgccaccatgcctgctatttttaaattttttttcgtagggacaggggtcttgctttgttgcccagtcttgtgttaagctcctggcctcaagcaatcctcccatcttgtcttcccacagcactggaattataggcatgaggaccgcacctggcctgaaatgaccctcttaacattcacatggcaggtacaaaccacccagagtcaaacaaccctcctcagtcaaacctgccctgacccacttgctagaagtaactttctccttctgtgaactcttacaaaatcttagtgcttttagcaatcatggacgttccaagccacatccctgatggcctacgtctttcacactttagaagagaactaggttagggaagattcaacaggtctgggaagtaaaatcccaccttactctggtggctatgtttggagggaagtgagagaaaaagaagacagggggctactgaggcagtccaagcaagaaatgatggtacttttggcctggggggttggcagggaggatgaaaagaactccctggatctgagagattattggcatatgaagtcattgggacttgatgatataatggatgaggtggtaaaggtgaaggaaagggagatttcaaaggaactctttgattgctggtttatgctagagatgaactatcatcccctgaatgacaaaacacttaaggagaaccaggcttcaaagttaaggtttgttcgggtttactttgaaggtctttgagaaatgcaagttgagatgtcaagtaaaagattagatttataggtttagaactcagaataacattctgcgctgaggacataaatctgaaagctaccagaattatcagatgtcaaagccctggatattgataaccctggtaataataattcctgaatgtcaagggagaaagtattagaatagatgaagagaaggggcttatgaccaagtcttgggaatctaacatttcatagtcaggaggttgaaattgagcctgcaaaggagatagaaagggaaggtgcaaagccctaggagaaaccagataaggatggtgtattagcccgttctcacactgctgataaaggcattccccgagactgggcaatttacaaaagaaaggtttattggacttacagttccacgtggttggggagacctcactatcacggcagaaggtgtctcacatggcagcagacaagagaagagagtttatgcagaaaaactcccatttttctcgtgagtctcattcaccatcatgagaacaacccaggaaagacccacccccatgattcaatcacctcccaccaagttcctcccatgacatgttggaattgtgggagttgtaattcaagatgagatttgggtggggacacagccaaactatatcagatggcattggacagccaaagaagagagtatttcaagatgggaggagtggtgtattgctgacaggttagtaaagatgagaactgagcaatatctgagatgtggcattatgcatgccttgaaagcctctgaatgagccatttctgaaggctgctaggccaggcaggaggaagcctgctgtgcataaggaggagaggaaaggggcagtgcccatggctatagtacaccatagctgtggtcaatgctggattaagggaggcagatgttaatgtcattcctgtgatgtggctaaaaaatatttattggatttagcagcctggaggtcatgatgtacttagggagaggcacccatttgcgaggacagctagggttagaacccaggtgagagagttggggattggaagagaaggaagtagaaactgtgccaatgatatggtgctgtaatgaacactggctacactatcttttgcctctctgcctccatctgcacaagtgcttagtgggagccccagtcactaccccctccttcctcagcaaacgggctcacatacgatgtcaaagaaaagaaactatggtgtgtgaagaaatgcttcagcttttttgtgtatctcaaagctagtgagtgccttggaattttttaagagagaccaccccgccactgctccctgcaccacctcactctgtgctgggtttctgcatgtgtgcatgtgtgtgtgtgtgtgtgcatgcacacatgtgcatatgtgtatttaaatggttttaatgtcaaaactgaggtctcctgctggtttaaagtatttgaaagaaactcctcctctgcagtccagggacatccctgtgtggtttctgagaaggatgaggagttcaagaagtgaaggctctgtcatacataaagagaaaacaatttcactgtgcaatccaggagagacaaagcagtgtagcatgtggcttcaggattctggccagcagaggtgagttagagagacagctcttaaccttcacatttatgtgtaacattagaggacaaggtattcagttagtggtgaaaatgcaacgaaagtaaatgctgacaactgcatttttttcccatcaaagtcagtttaacctaatttccactgactaagtgcctcatcctactttcaaaattccactgaattttaggcaactagatctttatagcaaaagttgaaaaaatagaaattttttttgtcacctgggcttcagacaggccttgaaatttcattctgtctttcctctataaccagcaattgtccaatagcaatataatgcaatccacaaattaattttaaattttctagtagccatgttaaaaaatgaaaaagaaacaagtaagattactttaagaacatattttatttaacccaatatatccaaaatggtaccacgtcaatagggaattaatataaaagtttattaatgggctattttacattcttcagttcatcctatgtctttgaaacctggtatatattttacacatacggcacatcctaattcagattaggcacatttcaagtgctcaatagcagcacgttgctagtggctatcaatcatactgaacatcacaactcgaaacaatcataaaaaaatcaggtacaaaaagaatctcatctaactggaaaatagggaactcatatttactgaacatctattaggtgacagccactgagctctcatgtcatttactcctcaccgcaattctgccacatagatactattatctactttttttttcttttttctttttgagacagggtctcactctgttgtccaggatggggtgcagtggcatgatcacagctcacagcagcctcaacctcccaggcttaagtgatcctcccacctcagcctcccaagtagctgggaccacaggcatgcacaaccactcctggctaatttttaaattttttatagagctggggctttcttatgttgctcaggctggtcttgaactgctggactgaagtgatccttctatctcagcctcccaaagtgctgggattacacatgtgagccactgcacctggtctctatctttctttttgagagagaaactgaggctcggaatgtttaaataaattgtgtttcactaagaagtggcagaaacagcatttaaactcaaggccgtgcttttcttaacacatgcttttgcttcccttggcagtacaatcagttaaacctccctgagtccttaatgcatatcatgatgttcagtcaagacgtgctcacggtaagaagagcagctgtaagaccacaaaatagtaaaagcttcaaagagcaacaagaaagaaaaagggccaccccatcaaaccccaattcttattaaataatagatgtgataaccaatctgaaagtaaatttcattgattgccttccttgtgtaaatgcgctttatggaggaaaaaagaaagtatgcaaccttaggggtctgaccgacttctctgcactccctcctctgcccttctcattctcatcttgcagggagccttctgtttcctgacaccttctttctggcttcacatttgtgcacctcttcttctctctggcgggaagattctcccttctcctgtctgagtgattacctccttctcatccttcaaaggctggctcaaacatcgcttcctgctagaagtcctccctgacaccctaggcagagttgaccattttttcctttgtgctttaattgttcatctttctatcagagcaattattacacatttgttctgaggtctgttttcccacagggtgtgagctcccagaggcagggagaatgccttattcaatccctgtggagtaagtgtctgactctgctattagctaaggtctcctggcccttaagccctacagaagattggatcagatcctaattacattgattagggaaacctaaagcacttcgcaaggggtctccaaattctgggggaagttcttatggtttatggtcttaaggttaattctattctcatgtcctaactttgtcaaaatttgttctctgtgtcttagagctacttctttccactcagctctgatgttgggcccccaagtaacttctctttgactctcccttcatcccaaaagcaaccatacaaaaaagccattttaccaaagaccaggggatcccaggaagggtgatacaccacaaagcaaatagcttaaaatctggtactagatttttctgaaaccctgttgccctaatattacattcctacttcttgaaaagtttccagcctctttctctcaaattctttttctgccagcctctttgcttgccccctccctccttcctcctccccacttctttttttctttttttttcaggagccgatacccaatattcctcttattttcacatgtaaaatggtacatcttttccttcctgctagggctccttcagatactggcatcatggatctccagcccaaacacttagcaaagtattttcccaggcagtttccctcttgagaaaaatctcagccagcagttaagataataataatatctccttctattcagaccagagtcagcaaactttttctgtaaagggggagatagcagataattttggctttctaagccataagatctctgccacaatgactcaactctaagtgtggccttagactagttactttacttctcacaatcaacctttcttacctataaaatggagttaatgcatatttcacaaaggagttgtgtctgttcagtgggacaacatctaagacagtcagtgcaatgcctgacacacacaaaaatactgtttttctttcttctttttttccacttcacagagcaacatattgtaaaaaatattgcattaatctgggtttaactgttttagtaattcctgaacaatagcaattgcaatttagatgatattaaagcaggcagactatcacacataaaggatttagagattcaagcacattgctaaatttgccagttgttcttttctttataagtaacataaaatcagggcacactgacttttgaaaaaagaacatttagttaaggacagccagagagaaaggttgggttaccctcaaagggaagcccatcagactaacagtggatctctcggcagaaactctacaagccagaagagattgggggccaatattcaacattcttaaagaaaagaattttcaacccacaatttcatatccagccaaactaagcttcataagtgaaggagaaataaaatactttacagacaagcaaatgccgagagatattgtcaccaccaggcctgccctaaaagagctcctgaaggaagcactaaacacggaaaggaacaaccagtaccagccactgccaaaacatgccaaattgtaaagaccatcaaggctaggaagaaactgcatcaactaacgagcaaaataaccagctaacatcataatgacaggatcaaattcacacataacaatattaaccttaaatataaatgggctaaatgctccaattaaaagacacacattggcaaattggatacagagtcaagacccatcagtgtgctgtattcaggaaacccatctcacgtgcagagacacacttaggctcaaaataaagggatggaggaagatctaccaagcaaatggaaaacaaaaaaaggcaggggttgcaatcctagtctcagataaaacagactttaaaccaacaaagatcaaaagagacaaagaaggccattacataatggtaaagggatcaattcaacaagaagagctaactatcctaaatatatatgcacccaatacgggagcacccagattcataaagcaagtcctgagtgacctacaaagagacttagactcccacacaataataatgggagactttaacaccccactgtcaacattagacagatcaacaacacagaaagttaacaaggatacccaggaattgagctcagctctgcaccaagcagatctaatagacatctacagaactctccaccccaaatcaacagaatatacatttttctcagcaccacaccacacctgtcccaaaattgaccacatagttggaagtaaagctctcctcggcaaatgtaaaagatcagacattataacaaactgtctctcagaccacggtgcaatcaaactagaactcaggattaagaaactcactcaaaaccgctcaactacatggaaactgaacaacctgctcctgaatgactactgggtacataacgaaatgaaggcagaaataaagatgttctttgaaaccaatgagaacaaaaacacaacataccagaatctatgggacacattcaaagcagtgtgtagagggaaatttatagcactaaatgcccacaacagaaagcaggaaagatccaaaattgacaccctaacatcacaattaaaagaactagaaaagcaagagcaaacgcattcaaaagctagcagaagacaagaaattactaaaatcagagcagaactgaaggaaatagagacacaaaaaacccttcaaaaaattaatgaattcaggagctggttttttgaaaggatcaacaaaattgatagaccgctagcaagactaataaagaagaaaagagagaagaatcaaatagacgcaataaaaaatgataaaggggatatcaccaccgatcccacagaaatacaaactaccatcagagaatactccaaacaccactatgcaaataaactagaaaatctagaagaaatggataaattcctcgacacatacaccttcccaagactaaaccaggaagaagttgaatctctgaatagaccaataacaggctctgaaattgtggcaataatcaatagcttaccaaccaaaaagagtccaggaccggctggattcacagccgaattctaccagaggtacaaggaggaactggtaccattccttctgaaactattccaatcaatagaaaaagagggaatcctccctaactcattttatgaggccagcagcatcctgataccaaagcctggcagagacacaaccaaaaaacagaattttagaccaatatccttgatgaacattgatgcaaaaatcctcaataaaatactggcaaaccgaatccagcagcacatccaaaagcttatccaccatgatgaagtgggcttcatccctgggatgaaaggctggttcaacatacgcaaatcaataaatgtaatccagcatgtaaacagaaccaaagacaaaaaccacatgattatctcaatagatgcagaaaatgcctttgacaaaattcaacaaccttcatgctaaaaactctcaataaattaggtattgatgggacgtatctcaaaataataagagctatctatgacaaacccacagccaatatcatactgaatgggcaaaaactggaagcattccctttgaaaactggcacaagacagggatgcgctctctcaccactcctattcaacatagtgttggaagttctggccagggcaattaggcaggagaaggaaataaagggtattcaattaggaaaagaggaagtcaaattgtccctgtttgcagatgacatgattgtatatctagaaaaccccatcgtctcagcccaaaatctccttaagctgataagcgacttcagcaaagtctcaggatacaaaatcaatgtgcaaaaatcataagcattcctataaaccaataacagacaaatagccaaatcatgagtgaactcccattcacaattgcttcaaagagaataaaatacctaggaatccatcttacaagggatgtgaaggacctcttcaaggagaactacaaaccactgctcaatgaaataaaagaagatacaaacaaatggaagaacattccatgctcatgggttggaagaatgaatatcatgaaaatggccatactgcccaaggtaatttatagattcaatgccatccccatcaagctaccaatgactttctacacagaattggaaaaaactactttaaagttcatatggaaccaaaaaagagcccccatcgccaagtcaatcctaagccaaaagaacaaagctggaggcatcatgctacctgacttcaaactatactacaaggcaacagtaaccaaaacagcatggtactggtaccaaaacagagatatagatcaatggaacagaacagagccctcagaaataatgccgcatatctacaacaatctgatctttgacaaacctgagaaaaacaagcaatggggaaaggattccctatttaataaatggtgctgggaaaactggctagccatatgtacaaagctgaaactggatcccttccttacaccttatacaaaaattcattcaagatggattaaagacttacatgttagacctaaaaccataaaaaccctggaagaaaacctaggcattaccattcaggacataggcatgggcaaggacttcatgtctaaaacaccaaaagcaatggcaacaaaagccaaaattgacaaatgggatctaattaaactaaagagcttctgcacagcagaagaaactaccatcagagtgaacaggcaacctacaaaatgggagaaaattttcacaacctactcatctgacaaagggctaacatccagaatctacaatgaactccaacaaatttacaagaaaaaaacaaacaactccatcaaaaagtggacaaaggatatcaaaagaagacatttatgcagccaaaaaacacatgaaaaaatgctcatcatcactggccatcagagaaatgcaaatcaaaaccacaatgagataccatctcacaccagttacaatggtgatcattaaaaagtcaggaaacaacaggtgctggagaggatgtggagaaataggaacacttttacactgttgatgggactgtaaactagttcaaccattgtggaagtcagtgtggcgattccttagggatctaggactagaaataccatttgacccagccatcccattactgggtatatacccaaaggactataaatcatgctgctataaagacacatgcacatgtatgtttattgcagcactattcacaatagcaaagacttggaaccaacccaaatgtccaacaacaatagactggattaagaaaatgtggcacatatataccatggaatactatgcagccagaaaaaaatgatgagttcatgtcctttgtaggaacatggatgaaactggaaatcatcattctcagtaaactattgcaaggacaaaaaaccaaacaccgcatgttctcactcataggtaggaattgaacaatgagaacacatggacacaggagggggatcatcacactctggggactgtcgtggggtggggggagtggggcgggatagcattaggagataaacctaatgctaaatgtcaagttaattggtgcagcacaccagcatggcacatgtatacatatgtaactaacctgcacattgtgcacatgtaccctaaaacttaaagtataataataataaaataaaataaaataaaataaaataaaataaaataaaataaaataaaataaaataaagaaaaaagaacatttattggttcacataactaaaaattcctgggttaggtttttgtatttggtgggtccaggcactcaacccatgtcattgggaatctgtgttctcttcatcctcctcccggcaggacctcctttgaatggtttccttttcaggtagattatcctcatgcagtagaaaatgcccatgagcagctacagacttagggcttagcacagggatccacaaactgtaacactcaggccaaatcccaccaaagcctgtttgtgtacagcctgttagctaaggaaaatatttacatttttaaagggttataaaaaatgcaaagaagactatgtgacagagacagagatgtatggataccaagctgaaaatgattattatctggccttttctagaaaatgtttactgacatcgcagctccagtgcacaaagagctcttcttgtccatttttttttctggcagaagacccaagattgctttcctgggagcttcttattgcttctctgtgctgccttctggaatttttctcatttctatatgtctcaggcatcagacagaacgggattaatggctttactgattctctcttcagctgcccttgaatttttaatcttaattactatattgtttattctcaaagttctatttagtacaatacgcttagtgttttctatggcttctttgtctctcattatttttttcctaccttaatcactttaaacgttcttattttatagtccctagccaaagctgagttttgggagggtttatatcttctgttgataggcctgctggcattggctcatgtgtttggggttttaaaaactcttggattgtgaattcatcttaacatggcatttaaaccgtgggaatcctggatctccaagtttgagggcatctctctggtgctacttttgccaggaattttaggaatgtctaaaaactgtttctacactaatttaccacacagaggtctccagtgccatagagagagtacaactttgaaccccaaagctggtgaatgcaggcctggagtttcaaaaattttcccccactcagagctcactccaaggaatgcaagcttctctgtcattttctttggtcttttaagggagggaggcctttccctgcttttcccctttcactaagggtagcaacttcatgtgggatatcaatttttccttctgtcccagactaaccatcaaatcccaaactccttggtttgtgagatcatcaaatacccccagatggccccaacttcagttcgcaggttattctctggttttagttgccatttcattttggcccctgggattttattttctttcttttgagctcagttgggacatttaaagagaagctggttctagtttatactgcttttccaggtgtttcatagcaggagggtttcatgtaatgcaatccaccacattgccccaaatggaaattccattaggcctgtgagactccatgtaagactatgccagcaccatgtgccacccatagagagcttcctctaccacttttatcacctagagtagcacgcaccttaagaggtgctcacaggatgtgtgttggagatgaccatttgggtgagtttccaggaaagcacagcaaagcctgctgataatgtgttttatgttaaggtatccagtacaatcatatgtatatggtgtaatggctcctgcgacaacagcattgtatggggcttaagagtacgtgctccagaatcagactatctagatttaaatttggtttcttctgcttcctagttgggtatccttgggctagccacttaactcttcttttcccagtatgtgaaatcggggtgatgatggaacctatctcagggagtcacggaaaagggtagatgagttaatgtctgcaaagggccgagtctgcggtgtggtctggtaaatcttagccttcgtttgtttcagggaaaggacctgggctggagaatagacccatgcacgaggttggggtgggggcacaaaagcccatccagataaacctgcccctttccagaagtgagaaagggaaggaggatgaggaaaaggctgaggtaactgaagagaatactgacccagtcctcaggaggaaaaacaaaaattaagattctaagaaaggttcttcgggctgggcacaatggctcacacctgtaatcctagtattttgggaggccaaggagggaggatcgcttaagcccaggagttcgagaccagccctggcaacatagagagactctgtctctacaaaattaaaaaaagagccagacattgttgcgtgcgtctgtaatcccagctattcgggaggctgaggtgggggaatcacttgagcctggtgggctgaggctgcagtgagccgtgattgcgacactgcactccagcctggatgacaggccaggccctgtcaaaaaaataaataaataaaataaaataaaatataaaaaggaaggaaggaaggaaggacagaaagaaggaaggaaagaaaggctttttgaattatagaattcaatgaggatgacttaaagtttgtgtgtgttggtctaaaaatgaaaccccaccgaatggcattaccggcttccacaagcacagaaacgtcactgtttattgtggaggctgtgagaagaatgtgcaaagcacattggccttcaatggaggtgaaggtgggactaggagagagtcaggggtcctttaacatgggtctccatgctccccttatgcttccattatctgcctcttacctaattcctaagtggtcagtattgaagtgccatgcaattgccttagaaacttctgatgccagaaaattcactctcaaaaggagaataaaagattaatagaagttcctaaacattttcaagggaaacttgagctgacacaaaatgcaaaaaggtctgcagaattttaacacatttctgatacaggttagaattagaattcttgaaaagatttgtttaaagtatgtttaaaacatttggctacgggaacagttatttgtgcaaacactatttctaaatggattgtgtggccccaccaagccagagtgtgcagactaggaagtggtccttgggctgcttcctcctaagtggtttgaacactgggaaatgtgtttctccctcaacaagtgcttattcagcagcttgagtggcaaagaaaggtgataatggccagatatcagcaacactccatttagttttttaaatggttgacaacatttctaggagcagctatctgtgagtgttgagtaaggattttgtgggactcagttaaattcagagaaaaacttgctacaaagttaatcagacattttcactgttaaaaacattttttttctgccgcatgtttttggatacaaatagaaaacagttcacacaaattattgtgatctgtatggttcctatacaaacacactgaatcttttagttttcattttttctcttcaggatgccagtgtctctacatcgtgacaactttgaatgtgaccattgtatcacctactaagtccggcagaactagaaattatggctgaagttccagaaagttccagaaagcacatttggccttataatagataattactaactgcaagagctgtgcatttactaaatgatatgctctgccaaggagcgagttccccatcacagagagcagcagaagccatcatcaggaatgctgcgtgtggatttctgagttgagtatgcggttaaaacacaagacgctaggtttagtccaatcttaaaattctacgattttaatcttttaaaaatagtgtttgcatagtatttttaagtttttgatgaacctcacatacatgatctcattgattcttttttaaaaaatggaggtcactttttcttggcttaaacaaatgaaaataaatataaacaatatagacttctgaagaaggatggcagaataaaggcaaaataaagactctcctcctccaacatctaaaatatgaataaaaataataaaaatcagcaaaaaaaaaaaaacccacaaaaaaacagcaacagcaagaacacaaagaaatgggagcaacctaacgtcatagacttcaaaaaggggaggacaaaggaaggaaggagagattttagaaaagtagtttctctgtgctcactttggaagacttggattaccaaaatattgaaaaattgaatcaaaagctattaatctgaaaagaaacaaattagcagggcatattgttttccttgaatgctttaggttatagaacaggttaataacaatatgaattcaacatagtgggtcccaaagaggaaatgatgaaacaagagaatgatctggaaaagtgattttctactgtcctatagaaacaaattaaagaccaaaacaatattatttttttttaatgatactttagttctagggtacatgtgcacaatgtgcaggtttgatacataggtatacatgtgccacgttggtttgctgcactcatcaactcgtcatttacattaggtatttctcctaatgttatcccttcccccgtcgcccaaccccacgacaggcccgggtgtgtgatgttccccgccctgtgtccaagtgttttcattcaaaacgacattattatagaactgataaatagataaaaatcatcaaaaaaaaaaaagctgaataggcacaactcaaaataagcttacagacagaaaaaaatccttaagataaagatagaaattgcatgtgaaaagcacaaagcaatttcagcctagttcttaagcctggttgtagacaatctgcaaataggacagacaaaatattcaaagctataaaacaaaaaaaattgctctgacaaatgcagaaacgaatctgcagattgaaagagcacaccatgacccaagaaaaacaaatactaaatgatcagcactgagacatatcctcattaacttatcaaacttcaaggacttttttaaaaagtattttggcataggacataaaaagtaaaggaagccagttagggttgcctttgacactaacaatcaattttgcatgccaagctataataaagcactacctaggatttccaagggaaagtgtgactcaagagtatttcacccatccagaatgagtttcagtataaaagtcacagataaatattctgacccacgacagaactcagggaacacacactcatgagtccttcttgagaggaattattcagtgatgaacagtcaatttagagatgaatagaaataaaatatttggaaatatagagtctgggataaaaaagacttcttaggaacacataattcatttgagtatggaactcatggtattaaacaattacgggattaatgtttccacaacagaatgtgaatattataagcaaagatattgtaaaaataatattagagccaaaattgggaagtgaggggtagggagatgggaggaagtacaagtctaaagatttactcatctttccgatgtgtgagtcattcaatattgtctaaaactgaaacatgttgctaaaaaaataatgactccaacattttaacatttttcatagtatcttttcttaaccttatttccccaagagggaatattgagcaaatagtatctcctgtggtaaagaatatttaatgaaagggcaacaaattttcagttttatgttagttttacttttctaatgttcaattcaagtaacattaaatccattagttttttgaagaatgtgtataatatgatcatctttatgtaaaaatatttttgcctgtctatgtctgtttctctttcaatctctctttagcatatgacatggcttgactctgtgtccccactcaaatctcaccttgaattttaaaatctccatatgtcaagggaggtaccaggtggagataattgaatcatggggagaatttcccccatgctgttctcatgatagcgagtgagttctcaaaatatctgatggttttatcaggggcttcccccttcacttgacacgcattctctctcctgccgccctgtgaagaggtgccttctgccatgattgtaagtttcttgaggcctccctagccatgtggaactgtgagttaattaaacctcttttctttataaattacccagtcttgggtatttcttcatagcagggtgagaatggactaatgcggcatacatttctctttcctctcctctcctttccaaatagtaactggattttcattcagatttccatctctctgccaggcaacctaagtacttcaggggactgtgaacccagctccagggccagggtggaatgattgggctaaggataattccttatcccagggaactcaggtcaaaaccaaccagggtgtggcatattcctgcagtagaatctggaatgggcttgtgacccagctcaggccagtgaaacatgaaggaaggcttggcggagaattctgaagaaggagcttctcagcttttaagagaagctcaccataggaaactccctctctccctctggacttgttggtttaaagacgcaaaacctggagctgctacagacatttttcaccactgcaagtgaagacttctgccccatagacagcgactggaagctggatcaggccaaccctgaagatcactctgtctctggatgtcggttacacaaatcaatacatttccatgtgttaaagcaattcgacttggattttacatatatttttgaaactgaaaacattgtaatctatatatctacttagaaagatgtgaaatatccacctaataataatcatttggggttactaataaaaattatttttacttttcttcattgcttactttataatgagctgtttcattttttaaaacacaaaaagttattattcttgcatattaaattgttaaacataaaagtaatatgtactcattggaaaaaaatccagacaccttctcttccaggtgacctaaatagaattagggagagagaaaaataatgatctctgatcagaaaatataataaaaatgattttagaaagagtcaacatatttactctgcttagaagtttacacatataatctcatttaattttcacaacatattatgcagtaggaagcatcattagctccattttatagacaaaaaaaatctcttgcattctgcaattgtctaaaattactttgaaaagagacagtttttaatagcatagttaaagataaaagatttataacatacacatgatagagaaaattaatatagtcatgcattacttcatgatggaaatatgttctgagaaatgtgttgttatatgattttgttgctgtgtaaacatcacagagtgaacccacacatcctcgaaggtatagcctaatgctcttaggttacaaagctgtacagcatgtaactctactgaatactgtggtcattataacaaattggtatctgtgtatctaaacattaaaaaggtacactacaaagagacttagactcccacacaataataatgggagactttaacaccccactgtcaacattagacagatcaacgaaacagaaagttaacaaggatacccaggaattgaactcagctctgcaccaagcagatctaatagacatctacagaactctccaccccaaatcaacagaatatacatttttctcagcaccacaccacacctgttccaaaattgaccacatagttggaagtaaagctctcctcggcaaatgtaaaagatcagacattataacaaactgtctctcagaccacggtgcaatcaaactagaactcaggattaagaaactcactcaaaaccgctcaactacatggaaactgaacaacctgctcctgaatgactactgggtacataacgaaatgaaggcagaaataaagatgttctttgaaaccaatgagaacaaaaacacaacataccagaatctatgggacacattcaaagcagtgtgtagagggaaatttatagcactaaatgcccacaacagaaagcaggaaagatccaaaattgacaccctaacatcacaattaaaagaactagaaaagcaagagcaaacgcattcaaaagctagcagaagacaagaaattactaaaatcagagcagaactgaaggaaatagagacacaaaaaacccttcaaaaaattaatgaattcaggagctggttttttgaaaggatcaacaaaattgatagaccgctagcaagactaataaagaagaaaagagagaagaatcaaatagacgcaataaaaaatgataaaggggatatcaccaccgatcccacagaaatacaaactaccatcagagaatactccaaacaccactatgcaaataaactagaaaatctagaagaaatggataaattcctcgacacatacaccttcccaagactaaaccaggaagaagttgaatctctgaatagaccaataacaggctctgaaattgtggcaataatcaatagcttaccaaccaaaaagagtccaggaccggctggattcacagccgaattctaccagaggtacaaggaggaactggtaccattccttctgaaactattccaatcaatagaaaaagagggaatcctccctaactcattttatgaggccagcagcatcctgataccaaagccgggcagagacacaacgaaaaaggagaattttagaccaatatccttgatgaacattgatgcaaaaatcctcaataaaatactggcaaactgaatgcagcagcacatcaaaaagcttatccaccatgatgaagtgggcttcatccctgggatgcaaggctggttcaatatatgaaaatcaataaatgtaatccagcatacaaacagaaccaaagtcaaaaaccacatgattatctcaatagatgcagaaaatgcctttgacaaaattcaacaaccttcatgctaaaaactctcaataaattaggtattgatgggacgtatctcaaaataataagagctatctatgacaaacccacagccaatatcatactgaatgggcaaaaactggaagcattccctttgaaaactggcacaagacagggatgcgctctctcaccactcctattcaacatagtgttggaagttctggccagggcaattaggcaggagaaggaaataaagggtattcaattaggaaaagaggaagtcaaattgtccctgtttgcagatgacatgattgtatatctagaaaaccccatcgtctcagcccaaaatctccttaagctgataagcaacttcagcaaagtctcaggatacaaaatcaatgtgcaaaaatcacaagcattcttatacaccaataacagacaaacagagagccaaatcatcagtgaactcccattcacaattgcttcaaagagaataaaatacctaggaatccaacttacaagggacgtgaaggacctcttcaaggagaactacaaaccactgctcaatgaaataaaagaggatacaaacaagtggaagaacattccatgctcatgggtaggaagaatcaatattgtgaaaatggccattctgcccaaggtattttatagattcaatgccatccccatcaagctaccaatgacttccttcacagaatttgaaaaaactactttaaagttcatatggaaccaaaaaagagcccccattgccaagtcaatcctaagccaaaagaacaaagctggaggcatcacgctacctgacttcaaactacactaagaggctacagtaaccaaaacagcatggtactggtaccaaaacagagatatagatcaatggaacagaacagagccctcagaaataatgccgcatatctacaactatctgatctttgacaaacctgagaaaacaagcaatggggaaaggattccctatttaataaatggtgctgggaaaactggctagccatatgtacaaagctgaaactggatcccttccttacaccttatacaaaaattcattcaagatggattaaagacttacatgttagacctaaaactataaaaaccctagaagaaaacctaggcattaccattcaggacataggcatgggcaaggacttcatgtctaaaacaccaaaagcaatggcaacaaaagccaaaattgacaaatgggatctaattaaactaaagagcttctgcacagcaaaagaaactaccaccagagtgaacaggcaacctacaaaatgggagaaaatttttgcaacctactcatctgacaaagggctaatatccagaatctaaaatgaactgaaacaaatttacaagaaagaaacaaacaactccatcaaaaagtgggcaaaggacatgaacagacacttctcaaaagaagacatttatgcagccaaaaaacacatgaaaaaatgctcactatcactggctatcagagaaatgcaaatcaaaaccacaatgagatagcatctcacaccagttagaatggcgatcattaaaaagtcaggaaacaacaggtgctggagaggatgtggagaaataggaacacttttacactgttggtgggactgtaaactagttcaaccactgtagaagtcagtgtggcgattcctcagggatctagaactggaaataccatttgacccagccatcccattactgggtatatacccaaaggattatgaatcatgctgctataaaaacacatgcacacgtatgtttattttggcactattcacaatagcaaagacttggaaccaacccaaatgtccaacaatgatagactggattaagaaaatgtggcacatatataccatggaatactatgcagccagaaaaaatgatgagttcatgtccttcgtagggacatggatgaaactggaaatcatcattctcagtaaactatcgcaagaacaaaaaaccaaacacagcatgttctcactcataggtgggaattgaacaatgagaacacatggacacaggagggggaacatcacactctggggactgttgtggggtgggggaaagcggggagggatagcgttaggagatatacctaatactaaatgtcgagttaatgggtgcagcacaccagcatggcacatgtatacatatgtaactaacctgcacgatgtgcacatgtaccctaaaacttaaagtataataataataagataaaataaaataaaaaataaaaaagtacagtaaaaataaagtattacaatcttatggagccattgttatatatgtggttgagcgttgactggaatgttgttatatggtgcataactgtgtatgcatgggactgtgtatgacacaaaatggaaatggaggtagcagatcttttgctactttggtagccactgggacagaagactgaaagccactaggtcttagtagtttggcctggctgagttttctaaatcttataaagagaaaagcccagatctttccctagaagctgccaccatctgaaattggacctctggcattttaagataacttactgatgcagcttggctgtgtccccatccaaatctcatcttgaattgtagctcccataattcccatgtgttgtgggagggacccagtgggagataattgaatcatgggggtggtttccctcatactgttctcatggtcatccataagtctcacaagatctgatcattttataaggggaaccccttttgcttggttctcattctttctcttgcttactgtgatgtaagacgtgcctatcaacttctgccatgattgtgaggtctcccctgccaggtggaattttgagtccattaaacctctttttctgtataagttacccagtctcaggtatgtctttatcagcagtgtgaaaacagactaatacacttacgcagaagtataagctccagtaaggtatggactgaatcagccttatttaatgttgtattcccagcactcaacatagtacctggtatacagtgagtgctcaataaatgcttggagaaagaaaacgagagaggggaaggaaggattatttttgatttctcttctggtccacccacctgcacctttctccaagttgatgatgccttttatctgtacacatcttcctcttcctcccctttccctttcagctggcaggaggacacctgatagcaggaacttgaactgccctcttgggccatgaaagagaagctgcactttgaggatgacaaagtaacaagatcgaatccttgttaagccacaattaaagccctgtattgcctcccagatttctgcatgggggaaagatgtccatcttctttaagttgtggtattttggggtctctttgaaacaggagccttattcttgactagtgtgtgtcaagtactgacacactttaagagaaaccatagttaccaggatggtaaaataattgacatttccctaattcatttcttaattttattattatttttaaacattagatttttcagaaactcatttggcttaagggggtttattgggtcatataacttaaaaactccaaaggattttgggtcccagatatagttaaatgcaagggttaaataacatacatagaactcacactttatctccatctctggctttgtttttttctgtattgtgttgactcctagaaaggatctctctgtgaggtgaaccctaaatctcttggcttatactgtccttagagatagcagttccagtgggaaaaaactccatatccccagtgttcccatcagaactggagattggccctcgttggactttcactgaatcatgtaccatctctgaaccaatcacggtggcccgtggctcagacctgggacatgcctctgccttgcagctggggatgaatcagttgtacctaaaccatgtgcactaagggtgagaaaagagagattccccaaagaaggtttagggtgctcttagcagaaagataggaatgaatgcagaaaggcaacaactacaaatgtccactataatttatttattaattcaacaaatatttattgaacaccaagaatgtgtctggctttttcttagatgttggagatgtagagtgaagaaaattcacaaaaatccctgccctctatcttagtccatttgagctgctataacaaaataccatagactggtggctactaaacaatagaaatttatttttcacggctctggagactggatgtccaagatcaagttgccagcaatttcagggtctggtgaggacccacttcctggttcatagatggcaccttctagctgtgtccttaacatggcagaaggggctggctagctctctaaggcctcttttataagggaaataattccattcatcagggttccaccttcatggggaaggctttccaccttcatctaacaaaagccccatcccctaataccaccaccgtggaggtgcagatttcaacataagaatttgaggggaagacacacacatattccgttcattgcaccttcccagaaaagttcttcatattcactaataatgaatttcttatttcttttgtcctcttaaaaagcttatgtgtaccttcttctgggatattacaaaactaaccaagggctctagaataaacttaaggcttacaaagaagtgatttggggcttttatattgtgggggaaggtgcaaaggcttggtggagttttggttgtgaggatgagagaggactaacaaagaatcaagaaaaagtcaacgtgatacccaaacagtttagaaatggagtctgtatattctcatatggcgtcatctcacccacaggagagctcaattattcttttttcccccatcctaatcttgcagcacacttgaaagggctggaagaaatcttacagtatgacatatgggcaccaattaggcttttctaggtctaggaaataaaatactaacttctatagttgttcctagtgaaagatgcaaagtaatttgtctcctggaggagtatagaagcatttgcaatggtttcctgttttgcacactgcccttgtctatgccagcttgttgtcttgacaaatttattctcaatagcagcaggacatatgcttatgattttcggaatggaggcactagagataagctggaacctgtcgctgaaaaatgaaccccagtgaaatttttttgtagccccatatttcaagatatgttggttatcctccagaaagtgcccaaatcaacaaaattgattcagagatttgtgcaaacttctgacacatacacagaccatattttaaatgacacataaacattgactttatacctcgtctcttcggtcttggccctcgtctcccccacccaactgccacaacttggcaaatactgacaactagaaggtttttatttatttaaacaaatatctggtgaagaaagaaagtggaatagtcaaattttgtttgtggttgggcaggtggtggggagcaggatggggaagaatcaagagaagtcagcaatgaacttcatcctagtccagtaaacactgcggtgtcttgggtgacctgttatttccttgccaaaagcaaaacaagggcacaggcttgatatagatggggaaagtttgtgtataccctttgactcaacatctcaaaaccaaactggtctattgtaagtgagtttgcaagttgctttctctctctgagtctcagttttccctatctgtaaaatggggttaataatacatagttcttaagattgttagaggactagatgatgtatcccacataaagcattaagtattctggcaggcacatagggagtgcttagtaaaaggtagtgcatgcacacacacacacacacacacacgtgttcacacaaacccacacaatgtcctgattatggagttttgcatgtcatctttatatagttgaacattgggcctgtgactacagtccttccacagataggtgtcctaaccatctgtaggctcaatgtaagagccacccaggtgtttgagtgacagaattattcagagaaacccacttcaaacctagacagagacagctctccttaatgactcagagcatctgctttctagccccaaagaggccatttagataacaaaggcaaatttgagatgtgaaatggctgatagcagcccccaaatagagcaggtgtggggtggaataaaagccctctgttgtccatcagtgtcagcagcacctctgtgtgaacggtggcgctgctggagcctcccatataaggcaggagatggagctcaggagccagggagtggggctggaaagctggtgaacagaaggtcactgctcagccaccaagctgatgagaccttgagaggaacgttaccctacagcctcatttgcacaggaagaaaccgaggttagcagagattcagtgagttgctggagatctactgtgagatggaggcaaaactaagaaaaggaactcagttctcctgcctctagcccagtcagttacttctcctgtacctcctggggtcatcccacctggtcagagcttgagagtatttattctgagcaattctccagagcaaggagaagaaaactgccaaggaaggaagagaaaggaaaactcttttttaaaaaatggggggacaagttattttttaaatataaaattgaatcatacttactaaagttaaacagttcagtactataaaaaataagaagtatgaatctcatgctcttcatcaaacacagcctcccccatcccattcaccagaggtaaaaactgttaacaatttttagtatgtcttccagacttttcctagagatttatatttatatacttttttaaaaacacagatgagattacacaatacatactcttcagaaggttgcttttttacttaatatgctacagctaccttttggtgtttatactcattgttaaaatggatctactgtgtttcatcatgtgggtgtaacatgatttatttaactggttctctagagatgggcattcagcttgtttccagcatttttctcactagtacaaacagcagtaagcatcttgttcaaatacccttgtgcaagtgtgtgagcatatctttcctaaatgttttagagttaggtctaaaggcatacacattttaaattttaatagatttgactcactatactttcaaagactgaatcaatttgtgctttcacccaaagttatcctttccctaccctcatcaacacttggtgccagccatcttcatacagttttccttatgttgttttcatggatgttcctgaattccaagtagagttgggcatccatttgtattgtgaattgccacttgtacttcctttataatgagctgtcttttattatgagctgcttgcttttatctttggtccgtttttctccttggttttcacctgtttttctttttggctttgtcaatcaagaaaaatgacctcgacaagtctcaatcattttagggggcttatttgccgaagctaaggatgtgtgcctgggagacaggtctatgcctttcttcgaatatgattttgagggcttcaaatttaaaggggaaaagagggggatattgagatatacacaatttgcatgcaagaggggcagtaggggaaaaaatagtcacttatgcctttgtctggctcagtgaatgtgaatttttacatatgatagcatagacaatagggcagaggaaacaataagatatgcgtttgcgtcaggtgggcagagggatgactttgagttctgtcctatgtccccacacctgtgaagataagctatcaatttatattgccatggtgaattttaacagaaatgctttaaggtaaagatcttggggcccacaaggaatttccttgtgggcaaactatgagggagatgtgtagcttttcatcgtgtagccatcttatttaggaaaaaaagtgggaggcaggtttgtgtgacccagttcccagcttgatttttccctttggcttagtgagtttggggtcccaagatttattttcctttcatagcttatagtagtaaaattaaataaatcagtctttgtctacaatatgggtgacagtaacatttctcagtttattgttttgtctttgggctttgttttgctctgttacattttatgtgatcaaatttataaatctattcttcatagcttctgggttttatgtcacactttaagagatctttattattccaagaaaataaaatactgcctttattctaatgctttcataattttttttatgttgcaaaaatagaccaagatgaaatttattttaggtaagaaatgatgtaaggattcagcttcctttttttctctctctctctcctgtctctttcttttatcccctcagatcactagtctattgtcacactatttattgatttatttattatttgacccttacctgaaatgtcaccatttttacaaatcacattcccattcatacttaagtatttctctgggctctattttgttccagtaatcattctgtctcttcatgtactaatataattttgtctcaaatactgcaggatcataatacattactagtttctattagggctatcctcacatagcttccataaaataaagtttgtttgtttgtttattcatttttaaaaaggaccctggttatgcctcaaagaaaagacatagtgataatgatctagcattatattttacaaaatctactccacatatattttttaggtttctgctcatatatatgagcaaaatcatgcagtgtatataagtcatttcctcctgggtcatcatatgttcctgatctggggcacactgtgatttgaacctagttattggtgtagtggcaacgggggcagttgttgtagtcttgtggaaaatgagcatcccctcggaacattgctatcccagcggaggttactgcagggctttcaaccaaagaaagcgtggtctccccaaacacagaagaacaagcaagggaggctcagagtgacgtgggtgtgtttagaatcagttctaacctgatgcctcactccaagtttcagtgtctcatgctttcccatttgatttcctatcttttacatcagaaatttggcaaggctgtgaatccaactgaaattgtaattctgcaagcctcccaattaaattttatgtttgatttttatcaatatcagcctgtggccataataaataaaagattatttttgggctgccctagaaatgtctagtttgccactcatgacttgaactgaaaattaaaggaattttagcctgtcatttgctttctgtaaatgctacagtacactccagaggatccatccaacatcatagtccttgctttagtttgcacttcatcacaattaccatagtttgattaattgcaaagctattacctgccatggattattagtatcaatttcccactggcaaagaaattgtctctgcactgaagcctaaaatcatgatcaaactagtaccaaatctcatgtgtgagggtctgtcttttaggaccactactggtatcaattctgtaaggtctagtcaggagatagctacacaccagtaatttgaacagaaaaaatgtaatatacagaattatgagctagtaaaatgcaattaactactaaaagagaactagagaatatagagaagaagctcctacctctagaatggagagaacataacataaagaattaagaacatgaaagaaggtccctcctccaaggctgaattcagccctcagtgggtatcttgtggctgacacagaaacatgtagcctctcagtggtaaagaaacttgtcagaaagtttggccagagctggtctgtaggaacagcttgctaggtggttgagacactctagaaggtgcaggcaagctgcagctggtttgcaggaactgaaactgggtggctaagttcactggagcgagctggtgggctgagctggagagcaggacatggccagctggggtaccaggggactggagctgacttataagaaacaacctgcaggcagctgaggggtcacagctggtctacaggaagtggtctgctgggtgcaggagaaactcactagagagtgaacgacttgggcctcctgtctgcctgtttgctgacagctgtaccataagagagtaagagcaccataactgaagataagcctcttcctctgctatgaccttacagcaacaccccagtaccctctattgacaattaggctaacacttcggcagttgggaaaggagaaatgtttacagggtccagtcccgctaccaccaatagagcaaagatggatgcatttggagctgagaggaaatgggttgataactggcacaactagtatggattatgtttgccagtttcaggatctctattctgatggtctggagatctcttatatttgatgatcatccactgttaataagggaaacacccaaaccctttaaccaacgtggtgcttcattttctcgggtttcctgtgcctctccacgtaagggcctttaaaatctacaatgtcagcagcttcagtgctcagactcatggtccatttgcaaggacagctggtgaaataaataacatctttgtggaaaaagacagaaaataatgaaataatataaatcaaaacaaagagatcaccataaccagagaatgggatgctaagtgagagtccgtttccttgagtgctagctggaagccagcatgtaaggaagactgaactgaactcataatgtccccaggacactgtgagtggagtgatgaacataaattattttcttcagttcctgtgatgagaaatatgactcctagttaagatagttggcaaaattcaagatatcaactatggattgtgcctgttttaacggtaaagcagcacttgccattaatacagcggatgttggccaggcacaatggctcacacctgaaatcccagcgctttgggaggctgaggtgggaggatcacctgaggtcaggagttagaggccagactggccaacatggtgaaatcctgtctctactaaaaatacaaaaattaaccgggcatggtggcacacacctgtagattcagctacttaggagtctgaggcacaagaatcgcttgagcttgggaggctcagtgagttgagaccacaccactgcactccagcctgggtgacagagcgagactccgtctcaaaaaaaaaaaaaaaaatacagtggatctcagaataggaaaccccgtctcccagactagcagtgtcaacgtcacccaggaacttaccagaaatgcaaattctcagaccccacccacacttactgaatcagagactctggagctggagtccagcaatcagtgttttaataagcccaccaggtgattctgatgtgtattaatatttgagaaccaccggtttagagagatataaatttaagacttggtttttggcaaaccatttaatctgtgcctcagtttcatcatctgtgacggctgcaccttaatgataactaccttatagggttgtagtgaaaattacataataaaatcagagtaaagagcatataaaagtgccttccacagagcattcaaaaactttttttcaatcacctcttaagacttaatacaaatttaagagaccagtgtttttaaagagtttagcatagtaaatatcaggcacataataaatagtatgccctcaataatgctagctatggtatcagtggtagtggtagtagtaatataacatttaacacctatattgtacttaccttgtactacgcatccttataagccctttttatgttatgttttaacacttaaaaccactctatgagataggtatagaacaattatcaccacttttgagctgaaggaaccgaggtacagaaggtttatttccaaagactacttagctattcagtgataaaacaaggatcccaaatcagatcatttcatttcagagtctgtgtttttaggcactaatctggaaagatacagaagacagagagagaggggaataaaaaaagggaaggggaaagagactatgccattttatactataaattttaaaaagaagtctttttttccaaaaatggaaaccataatattgcagaatttgcagccaaaaaaatgatgaatggtgttgcctccagcccgaggttccagggagggggagaaaaatatccagccgaagcccctgggagtagtgggggttggggggttggcctgttctgggcttacatctttttcactggtaatgatctgggaggcaggaaaacattacctgtcagtgtcattggagttggtgctgttgcaaaatagcaagatatagaaaagaatcaaatactgagaacttagaaatcttggcagacttgggccaaaatgtgcagtaacataatgccaaggggccttgaaggaggggacaggggagaacaggtgaaaactcaaagttctttcagtctgctgtcacactgtggacagaacagctgctgctccccccaagagccaaggtcaccgtgggtagaaattggagaggcaatgcccaaaacgtggggaaagagacaagccccttttccttcttccctcccagcctgcaggggcacacctggagtatggccttttgtaagttcagggagacctcaaatataactacattttctaaatatgtcagggaaaagaaactacaaaagattgaagtagagaagaaggaaattcttaggtatgagaattatgtaggctgggaatgactggaaggcagcgagacctattggttagtgtaggataaggtgagcaggagagtttcaattcagttcatctgtatacattacatgcctactatgtgttaattactctttaggttttggtaaaatagagataaagaaaacatggtcctgtcctgagatgttgccagtccaatgcagggggagaactgtagatagataattacatacaccacaaaaaaaaatggccataagaggatgtcctgagaatacagagcaggggtatgtaacccagtctaggtacagaagacagcagctatcagggaagccttcttgggagaggcagtgcttgagctgagtcttaaaaagatcaggcgtatatcagttagaatgcttttggctgcatgtagtaaaaacctaaactcaatagccttacatgataaaggtacttattacataacataatatagagtctagagatattgcaggctcattaattcaacagttggacaatgttataaagcagcagctcccaatctttttggcaccagagacaggttttgtggaaaacaatctttccacaggctaggttgcaggatggtttcgggatgaaactgttacacctcagatcatcaggcattagttagattctcataaggagcatgcaaactagatccctcacgtgcacagttcacaacagggttcgtgctcctttgagaatctaatactgccactgacctgaaaggaggtagagcttaggtggtaatgcttgctcccccactgctcacttcctgctgtgtggcccagtccgtagcccagggttggggactcccgatataaaggacccggtttctttcatctctgttttgccttcctccatgtattagctatgttcgcaaattgctatccctcgtggtcataagatggctgcaaaaacttcacacatcacatctggacacacctatgtcaagagaaagaaaagggtacttccctttctgtttctttcttctaaggaagtaaacatttctcagaagcctcctcatgactttccctcatatctcattgtccagaatggttatttatggccacacccaatccattccctggggaaacaaggaataaaaccaccctaattaacttagactgttgagatccaccacccagaagaatggttatttaaacaaaggcagtaaggatctagattgtggaggatgttgtatgagctctatttaatagggtgggtatttacaaaagtccccttttttactttaatagttttattcagatataatcgacatattaaaaaatcatacatttaaagtatacaatctgataagttttgacattttatatatatatatatatttgtgaaactgtcatcacaatcaagatattataataaacacagccatcaccctcaaaggttttctcctgtcctttcataatttttccctcatgcccctgcccacccatcccaccccactgcttcattccaaggcaaccactaattaactttcaatccctttaggttagtttgtgttttccagaatttatataaatggaataattgtgtgtatgtactttttttgtttgactgctttcactcagcaacattatttaaaatttacttatgctttgtgtgtaccaatagttgattcctttttattgcttagtagaattccattgtgtggatatactacaattttgtttatctatttacctgttgatggacatttgggttgcttccagtttgggctattacaaataaaactgctatgaatattcatgtagatgtcatcaaacaaatgctttcggttcccttgaataagtctctaggaaaagaatgtctcactcatatagtaggtgtacgtgtaactttcaaagaaattgtcatacagttttctaaggagatggtaccattttgcattcccgctagcagtgtatgagcattccagttgctccccatgctcaccaacatttggtatagtcagtattttcaattttagatttctagtaggggtaaacaattcttttttataataatggcatcataccactgtatctattatcctgaaatgaaatttattgcttttatacctacatatattacttttaaaaacccaacacaatgtcccaactgtaaagtaaaagagaaacaaaaataaaacaactttcaataaataatgtgtgttttagcatgcatctttaataaagtaaataagtaggcataaaatggatgacataataaaatagtcaatacttctccctgcatgtaggatcactgtgaatgcttgagagacagattgatacaggtgtgctatttggcaactcaaacaccaaaagcagcattaccattagagatgtgatttttcaaaatggtgaacaactttacctaaatttccagacaaaacatactaaattttctcttgatttacccataattgcatttgtgtaaaatttaatgattgttaatactatggaaaagtttctttgtggttacttattaaataaatttaagttctaggcttgaaccaaaagtttatttgtttcttttttacctactttaacatctagtaggacattaggaagccatatgggcaagtcttttgattatattcagaacttttgaaaaaatctagaaaggaagtgaaatcagcaagatggtaaaataggtggtcctatgcttcactccctcaatggaaagatcaagtggcaactatccacagacaaaaacatctaggtaaaaccacccaaacatggaaataagccagagtcagctatgtgtaccacaaagctgaataaaaatccatattgaaagggtagcagaaacattattgctttgactgcattgcccctcgtcttcccccaagtaggcacagcaccaacagagaggattccctagggcccatgatttctacagtgggaaaagacaccccccagtctggggaagcagacatccagcttccctagcgttgcaaaacccttcccaggaaacccatttattgtcacctcacagagaatgggaaatgtaggggtaaactgcacacctctcagtgacacctgagatcaggtagaaacaaagcaagaaggcagagcccacagagatgagagcacagatttttgtgatagctcaatgtacctgccagcagaggtgcttgatcagtggcatcagctaacagcatagcacatctaccaagcatagttagtagctcctagaagaattaggaagtgctacttggtttaatccgcagatgaccagcttcagaccctatgctagggctttgcccggggagggagaagatccccctacctcagcaaattttgacaaaaagtcaggcactagttctgccacacctgggagcttagtcagtgctccttgtgtcctcaaagccctcctcataccttgcccagggacggaggcaaatctcaaccatgcattttttactgaacagagcagctgatctatttatcctgatccactgaaacttggggatcctcaattgctgaactcaaataacagcacctctggctagggaattcatcctgtggccctgtcagattagagatgattgcagtgcccatccagaagctcagcctaattgcagagctcaaccagtgatcttgccaggtagcagagcccagccaggtgccccacctgaattcagggcaaaggcagcaacccagtcatctagataacctgaaagtaatccagggttattaccatctggcccatccagaattataagctagactaaataatgaagttctaaccttgccaagaaacacctataaaagttagaaaaggtggctgtctctgcaaacgtgcaaacaccaatgcaagtacacagggatgacaaagactaggaaaatcatgacatctcaaaaagaaactaacaaagctccaacaatagaccctaaagaaaggcagatctatggaaatgacagaaaaataattcagaataatcctctttaaaaagtttggtgaacctcaacatacaaattaaaaattaaataaaatttggaaaacaatacatgaacacaatgagaagttaaacaaagaaatagagatgataaaaaagtagaaattccagacattaagaatacaacaactgaaataaaaaatgcaatacaaagcttcaatgactggttcagtcaaatgaagaatgaattaatgagcttgaagacaaagtatctgtaattatttcatcaaaggagcaaaggaaataatacaaagaaagcctatgaaaatcatgggacaccatcaagagatgtaacctatgcataataggaattcaagaaggaaaagaaaaacaaatgggatcagaaagcatatttaaaggaataattgatgcaaattttcttaatctgaggaaagaagccaaaatccaagtacagagagtgcagaagtctcccatcaaattcatcccaaagaagagttcaccaagacacataataatcaacctatcaagcatcaaaaacaaagaaaaaattctgagagaagttagagacaataaatgtaccacatacaaaggagtcccaatataattatcagtatacttttcagcagaaaccctacaggccaggagagagtgggatggtacattcaaaatgttgaaagaaaaaaactgccaaccaagagtactttccccagcaaaactgtctttcagaaatgagaaataaaaactttcccacacaaacagaagctaagagagttcatcaccactaggccttctttataggtattgctaaaatttttattaatggaaacgaaaatctgctaattaataacataaaacttatgaaagtacaaaacttaatggtataagtagtatagagaaatagtcagaatactctaggattatcatagtagtgtgtaaagtaattttatctctagtataagtgtttatctctagtgtaattttatctctagtataaggacaaaattattaataacaatgttacctaagataaatggtcaagggatacatattataacataatgtaaattcagacatcaaaaacataaaatgttggaggggatagtaaaatgtagcgttattttatacaatcaaagttaagttgttatcagcttgaaatacaatgttaagtataagatattctatgtaagcctcatggtaaccaaaatcaacatttataagaaacacaatacaaaatgaaaaagattcataagacatcactaaagaaaactatcaaaccacaaaaaaagacagcaaaagatgaagaaagaaacagtctctacaaaacaatcagaaaataattaacaaaatggcagtagcaagtccttacctgtcaataattaccttgattgtaaatgggttaagttattcaataaaaagaaatgaagtttggaaggcctctagtaacattatacttcaaatttcattcaagtttacagaacccaacatatgtgctgcacataaactctctggcaggatttctttgatgttactaaccatttttttatttttggtactggtcacttctctaaaacagatctcagcactgcatttaccaacaggacacccttttaccactttgaccctgaagatttcttttacaaatcttagtgtcctcaaggagaattaggagccttgactttggagtgggaaaggctaaggtttgaatcctacgtctgctgtctctgaccttaagcaagttatttaaatttcgaatctgtttttcctaaaatgacaatagtatctatttctgaggattgaggtgggtgtaaatgagtttgtagagcacacataaaaagtgttcaataaatgataactattgactttaagaataattttattactataaaatactatcccttatactatgaagaaattattcaagctagaatttttagctttgctaatttacaaaataatcagatagtacaatttcagctaaatcctgaggttatatgtagttctaaagtttggaattaaaaaattgaattatgataggaagtaactttttaaatggttggaggaaatctgcctgtaatgagatacaattactacttattacactgaatccagatgcagagtcagtgtgtcattttcttctttgtactgaaaatctttttattttaaaggtgaagcaacacatagtcttttatccataacttagtgtagcacaatcttagaaagcctaaggcaaatgtgacttttctatgcatgtatgtgtattttgaagaatgtgtaaaacttatgctaatgtttgcacgcgacaacgatattagaaaaatagtcatgtcctttttttgtagccacttttcttccatacaggtccataaacctgatgttacttacagaagaagctttagatctagaattacttccttttgagaactgatatgctatgtgatatagtctgtgtttataagcggaaggcacctctttgggtaaacatttctttccacataattgagcttttttttgcttatgtcagtgaggggtgatatttatattaataaaacattatacttttagtgtttgtagcactaatttggaattcctgattaaatgtgccatgaatgttgtcttaatttttttttaaaaaaagacatagagtgaatgaatgggatttaaaaacaaaacccaactctatgctgcctataggagactcacttcaattttaaggacacacattgtctgaaagtaaaggaatagaaaaatgttttatataaatgaaaccaaaaaagagcagggatagcaatagttaaattaaacaaaatagattttaagtcaaaaactgtaaaaacgagaccaagaaggacattttataatggtaaaggggtcaattcatcaacaggataaaatgattgcaaatatatatgcatgatggctgggtgcagtggctcatgcctgtaatcccagcactttgggaggccgaggtaggcaaatcgcttaagctgaggtcaggagtttgagaccagcctggcaacatggcaaaaccccacctctaccaaaaatacaaacacgtgtatggtggcgcatgtgtggtcccagatactcagagattcacttgagcccaagaggcagaggttgcagtgagccaagatcaagccactgcactccattctcggtgacagagtgagcccccatctcaaaaaaaaaaaaaaaaatatatatatatatatatatatatatatgcatgcaataatggcacacctaaatatataaagcaaatatttaaaaatctgaaggagatatagactgcaatagaataatagtgtaggggacttcaatataccacttttggtaatggacaaatcatgcagagagaaaataaacaagtaaacatcggacttaaacagcattcaagaacaaatggatctaacagacatatatagagcattccatctaacatcaacagaatacacattcttctcaagtacataaaacattctccagaatagatcatatgttaggccacaagacaagtcttagtaaacttaagaagactgaagtcatatcaagtacttttttgaccacaatggtatgaaactagaaatcaatagcagaagaaattttagaaaattcacaaatacatggaaattaaacaacatgctcctgaataaccaataggtcaataaagaaattaaaatggaaatttaaaattatcttgagacaaatgaaaatagaaacacaacataccaaaacttatgggtttagcaaaagcagttctaagaaaaaaatttaaagcaataaatgcctacgtcaaaagagaagaaagattgcagataaacaacttagtgctatgcctcaaggaaatagaaaaggaagtacaaagtaagcctaatgttagcaaaaagaaataaataataaaaatcagagcagaaataaatgaaacagggactcataaaacaatataaaagaacaatgaaactaagagttgttttttttaaagattagcaaaactgacaaaccttaacaaaagctagactaatcaagaaaaaagagaaaagttccaagtaaacaaaatttcaagtgaaagcagagacattacaactgacaccacagaaatacaaaggatcataaatgactgctgtgaataattacatgccaaaaattggataacctaaaaaaaggataaatccctagacacatgcaatctaccaagactgaatcatgaagaaataggaaatctgtacagactaataacaagtgagatcaaatcagtaataactttcccatcaaagaaaagcccttgacctgggagttttactgctgaattccaccaaacatttaaagaagaactaatactaattcgctataaacttttcaaaaaactgaaaaggagggaacactatgaagctctttttatgaagccagcattaccctgatttcaaagccagacaaggacctcccaagacaggaaaactacaggttaataccattgatgaagagatgcaaaaattctcaacaaaatactggcaaactgaattcaacaatacattaagaggatcattcaccatgatcatgtaggatttatccctggaatgcagaatgatttatggtttgcaaatcaataaatgtgatataccacgttgacggaacaaaaagagaaaaaccatatgatcatctcattagatccatgaaagtatttgacaaaattcaactttcatgataaaaatattcaacaaattaggtatagaaggaatgtacttcagcataatgaagaccatatataataagtccatagctaagattatactcaatgataaaaaaatcaaaactctttcctctaagactcagagaaagataaggatatctaatctacacttctattcgatgtagtattggaactccaacaaaacaagaaaaagaaataaaaggcatcctaataggaaaggaagtaaaactgttgctgtctgctgatgttatggtcttatatatagaaaaccctacaaattccaccaaaaaaaacctgttagagatgataatctaagtaaagttgcaagatactagatcaacatacaaaaatctgtagcatttctctttacttacaacaaactttccagaaaggaacttaagagaacaatcccacttaaaatagctacaaaaaataatgaaataaaatacttaggaataagtttaatcaaggaagtgaaagatatgtacactgaaaactataaaacattgataaaagaaattgaaaaagacacaaatagatgaaaaactatcttttgttcttggattaaaataattaatattatcaaaatgtcgatactacccaaagtgttgtacatattaaatgcaatttctatcaaaagttcaatgccattttttatacatgtgaaaaaaattataaaatttatatggaaccacaaaaaaattctgaatagctacagcaatcataagcaacaagaacaaagctggagtcatcatactacctgatttcaaactatactagaaaatgatagtaattaaaacagcgtggtacaggcataaaactagacacgttgaccaatggaacaaaatagagaactcagaaatgcatccacagtcaaatgatttttgacaaaggtgctagaaatatacaatgggaaaaaatagtctcctcaagaaatgatgttgggaaattggctatccacatgcaaaagaatgaaattagacctttacctcacaccatatacaaaaatcaattcaaagtagattaaagacttaaacataagacctgaaactgtaaaactactagaagaaaacatgggaaaagctatatttcatttatttaggcaatatgtttttagattatttagatgttttagaccccaaaaactcaggcaacaaaagcaaaaataggcaattgggattacatcaaataaaaagcatctacacaacaaaggaaacaattaacagaacccgcagattgggaaaaaatactggcatgccatacatctgataagagattaatattcaaaataagcgactcaaacaactctaaaaaagaaaataaatatccaattaagaaacgggcaaggaacttgaatagacatttctcaaaagaagatatgaatcactaacagatatataaaaagatacttgatatcactaattattagaaagatgcaaattaaatccatactgagatatcatctcatacctgttagagtggctactattcaaaagacaaaagataacaagtgctgacaaagatgcagtaaaacaagaacccttgtacactgttggtgggaacgtaaattaggacagccattatggaaaacagtagagaggttccacaaaaattaacaatagaataccgtattatccagcaatctcacttctgggtatttactggaaggaactgaaatcaattgaaaatacttgaagtcaattgaaataaattgtgtgttgaagagatatctgtactacagtgttgatgcagcactattcataatagccaagagatggaatcaacataaatgaccatcaacaaatcaatgggtaaagaaaatgtggtatattgacacaatggaatactattcagcctttaaaaggaaggaaatcctgtcatttgtgacactgatgaaactgaaggacattatgttaaatgaaataagccatgcacaagaagataaatactgcatattctcacttacatgaggaataataaaacaatctcactgataagagcagtgagcagaatggtagttaccagaggctgggggttgggaaaatggggagttgatggtcaaaggttacaaagcctcagttaaataggaggagtaagtttgttttgttttgttttgttttgttttgttttgttttgttgtgtttggagatctattacacagtgtggtgaatatagctaacaatttattactataattttcaatattgctaagatagtaaatttcaaatgttctgatcacagaaaatgttaaatatttgatgtgatggatatgttagttagcttgatttaatcattctaccttttatttttaaatcataacatcactttgtatcccacaaatatatacaactataatctgtcaatatgtaataaagtgaatctagaaaggatattaagaaaatgtggcacatatacaccatggaatactatgcagccataaaaaaggatgagttcatgtcctttgtagggacatggatgaagctggaaaccatcattctcagcaaactatcacaaggacaaaaaaccaaacaccgcatgttctcactcataggtgggaattgaacaatgagaacacatggacacaggaaggggaacatcacacactggggcctgttgtggggtggggggaggggggagggatagcattaggagatatacctaatgttaaatgacgagttaatgggtacagcacaccaacatggcacatgtatacatatgtaactaacctgcacgttgtgcacatgtaccctaaatcttaaagtataatttaaaaaaaggacattattggttaatttggaaaatttataagtataggctgtaacttattaatgtaaaatagaattgcattaatattaaatttccttcgtatctgtagttatgtaagaaaatgtccgtgttactaggaaagataagctgacatgtttaagagtgaagtattatgatgtttgtaattaaatctcaaatgattcagccacagagaaaaagagaacttttgtatatatacacacagagaaaatgataaagcaaatgtgccaaaatatcaccaattggagaatagaggtgaaaaaactgtgtctgttccctgagctcttataacttttctgtagttatgaatattttccaaaataaaaggtcaaagaagggagggggaaaagatttttcttagctactgaggtcaaagaaaagaatgggggaaaattctttgccatgtgggtagcatagctccatgtttcgtggaacacctatcccttcctgggcttcaatctgcagtgccagctttgacctaatcaccacagcatcccaagttgcccctataaatttctaaacagagagaaagggagtgagcaccaatgcttagtatctctacactccattgagaaccatcactggaggggaacccatgtagtgatgtgcccttggttagggttggaaaaatgtatagagattaagagctaaatagagtttatttcgcttctccaagagtgtcctgtggaccagcagtgccagcatcccctggaggcttaatagagatgcagaatcttatacctcaggccctggctctctcctcaacttctgaatcagaatctgtgttttaacaagatgtgggtgatgtcgaagcacattgaaacttgagcagcactgttttaggctgcagattttaagctatgctccctgggcaaggcccttgggtgggtggagggtggggagtggggccaccctcattcctgctcctaacacaagactcagctccttgggcttccacttcaattttgggttgaagaaaaggtttggcagctgaaaacatttgaaaaactactctccagctctccttttaccaatgagtaaatggaggcccacaaaagtggcgtggctggctgacatgcacaggacgcattcctgatgaagtcaggactcaaattcagcactctcaatcctgagagcagtgctgttcccacagtgctctgggtttttttgctcagtgacataatgtgaggctgggttagggatctgctgctgtcactgtgcaccacaggcccacagcctggcccccactgccctgctggaagccatcagtggatcccagcagcaggcagatcttatctgtctctgtgacttatttctttgagaaacatctctctggcccttacaacgtgccaggcatatagtaagtattttataaatattacccaattaaaactccataacaaacccatgagtaaccaaggcacaaaaatgttatgcatctgtgataagcacaagtcgacctcagggaatgagtagcaatgagtagctgtaagaaagccactgatgcttgggacctgatatcagaatgtgattttgtttctctttggtgcatttggggaaaacaggcaaactcaaccagtgaaacgagagtccctccaggtctcctccgggtgggatgaaggctctctgcagccttactgacccagccaccagcctgggagcagagcctgcttggccagggtgaggctgctgggggagtatgggtgcagaggggatgctcccagctgttggatgagcagggcctgggctgccctgtagactccaggaggctgcagactcactccccggctgcaaactgcagcataaccccttcctccatctcacagactctggccttgctttgttttccttagtgcttgcttgcaggcttctgaaccatccacaagtacttagaatgttagctcagactactcaggcttttgtaggagcccctgccccccatctccccaacaccaaaacaaaatagtcgctgcccccctcatcctccatccctgcccaaactctgtgctggtcaaaagaaaagagtcttctttctaatcgaacctggaattagctccaggatctgagactcatttgttaaatttcttacagtaataagcaaaggctgtctgtggatgttattcccaattgttttcacctcccaagggctgtctgagacattttgcctgcaaagccctttacaaattatcgtctgcctcttaggcaagccatctttgttagctctgaggcattattaatttattacttagctttgtgtagtgacttgtcttaaaaaggccagcaattaatcacatctccctgctccaagagtcttgatttagcttcctttcatgtttttacacatatgcatgagtttgaaatagggaaatgaccctaaaagatatgtgaaaccccaaattggtcttttacaagtttataaagtgcagcaaacccaatttaaatggaaatattttcctctcatttgaaaagattatggcctaagctttatttatgtggatgcagttgttcctcagcaggtctggaagcatgcccctgaggaaggcatgtccaccaaccactcaagcttaatcagtaaatacgtggattttgttttccagttccagctgagtgatgaaaacaaactaaacaaaagcatgaaagtgaaagtgcagattgtactcctatttcttaagttacattttaaatgctatatccttcgaactggctctagatacatcaatgatcaatcctgagattatttaaattagctgattttaaccctctgcagactgacttagctgctactgccttgtaattggctccaaaaatctggctgttagtccacactatgttcactcactgtgcctgtctcagattcatgcagtgagcccaaaggtaggaacttcaatattttggcttcacttctcacagaaatcttggttgccagtgttatgggctgaaatgtgtctccccacaattcatatgttgaagccctaacccccagtacctcaaaatgagactttattctaagatagggtctttacacaggtaattaagtttgaataaggtatttagtgtggtctttaatccaattcaactgttgtccttataagaagaggaaattcagacacaggcaggtacagagaggagatgatgtgagaacagggaaatgatggccatctataagccaaggatagaggcctcagaagaaatcaacgctgctgacaccttgaactcagacttctcgcctccagaactgtaagaaaatttatttctgttgtttaagtcacccatgtgtggtactttgttatggaaaccctaagacatcaatacacccagctttcattcaggtcttacatttacttttaagcaaaagaatattacatttgactgtggagacttatatatgcttctgggatgaaggaataatctgaggagagaatttggaaaccatggcagacacagagcaagctcataaccatcaggtagtcagattcttcccaatgacttggtaactagctggcttgaagtaagacccttaaaataagctttgcctcttacaggtcaagaggagacaagttatgcctgagctataaagacttctttgaatttcctactcagagaaactgtgagtcagcatcacgaaaatgggcttctggtagaaaaactgtggtttgttgagttgcatgaaaatatatgtgtatctcaatcactaggtgtaccaggataattaatgtgagctatcacaaccaacaatctggaaaacttcagtgcctttacatggaaaagtttgaagtgcctttgtacaaactatgatgtggttcagcaggaggtttcctccaggcagtaactctgggatccaggatccctctatcttgtgatgctgccatctcaacatggggctttcaaggtcactgtggcagagggagagagagaggacatgcaccagcttttaactacctcagtccagatgtgacacataggcttatagtccattggtttcaactaacatcaggggatttggggaagtgtaggggagcacacagaatattggcaaactcagaggctctctgccatattcttgaactctcattatgcgctagatatagtgctaagaacttcacatatagtgtctcgctttgtcctatttttacacaggtagaaactgaggcttagagaagttaaattgatcaaggtcataggaatataaatgctagagctcatatggagattcagacatacctatttcccgaagtccatagccactaggcttgatgggacatgttttactaaaaacctcaaagttcttatctttatttttatttgccatcttaattattctgaaaactgagggggagttaggcagtccaaatcctgaaatgtttaaaataattgtctccactgtcaaaattttctgggtgattcaaagatatagagacccagtttaagactcacagattttataagtgtatcatgtgcagcattttacttttaatgttaaaaggttcattgaggtagtattttcaaacagcatgctttgctttattttaaaaggaagatgctaggacatttcactcacttttgactgattgcccccagaatgccaaagaaacaaataataaagtagggtggtggtccacagcttacttgttgaattttcatagatagccccagaaaaagagacattgccctcaagataacctgcaactcataaactaagaagagctgtgaaatgtcgaatgatcaaaaaaagtctgaaaaaaatactggagtggggaaaggtcactggctccaaacaaatcagacccacccaaacattgatcagagccatgcccttgcctcgtggctgaagttaattctctctgcccatttgtaatgtgataaattatcatttttaagtcattggtcatcttcaaaatatgctctttcctcttggcccaagacctactcacccatgggttttaaatactcaataacttcagtcacagagtgattttactttttaaaacttattttgaggcacattcatatggctcaaaacacacttctgacctgcaagccttgcccgtgatttgaccttgtctccaagaaccttactggaaacaatagggcaacctcaaatattcagactaattgtgtagtgggggaggatagaaaccagatgaagttagtggaaagtctgagttatgaaagagtataataaataccatcctgtttttttttccagctatatttaaagtcaaagtgttgataataagatgtcaaaggataggtgcttccaaatattagttcttgcattggtgcctattaatggtttggggccctgttttcactggtttgaagcaaaatgagaaaaagaagagcaatgtggtgatttgttcaaggggttaaatttatttagcttttatattttggtatgaattcatatttcttttgttttttaagttagtcttcaataaaatgagggtgaaatacatttttaaaaatggtttactttccaaagtaaaagcttgacaacattgtcaatctcctacatatatttaaaattacattcatctataaaatttagcaatgttgggctcacttacttagagacctacctttttagtgaaagagtaataggttggtaattatgtgtatatcaatgtcttttacaatggaggcagtagacagtagtgtttaagagcttggagagtggtgtttcataggctttgtgatcagccagccctcaattccaaccttggttgaactgcttacagtggtgagatcttgggcaagtcatgtgacatctctagctctctctttcctcatctgtaaaattggaataataacagcactgtatctattacttataattagtatgagaagccaatgagaaagcagatgtgaagcaattagcacgtagtaaattctcagtgaatgttaacgattatcaacattattaatgaattaatggctgcctgcactcttagcagttgtttgcattgccctcttctttacattataaatttaccaggcaaaccccgtcttctggaatgtttccaaaatgaattgatctggccctgttaaatgagcccagtttttagaatgtgaagtattgagactttggtgcctgattttcccttctccagaagcagaaggaagaaatccctctctgctccctccaccccatctttgaccctaaaccaaatgcctttgctgtcatcttgctgctttgcagatgttgctcaggttctgcagatcctcaggacaaccgaagacaagcagtggccacagccctctgggttcttcccatagctacgcacagattcttgagggagcttagagacgtcgttttccggccatcattttatacatgaggcagcaaaagtcaagacaattgaagcaacaggtagcaatgaagttaaggaggaaaacagtcaaagctgaatgaatgctgaagtcattacggtcatgcgctgcataatgaggtcttggtcaaaaacaaaccccatatatgacaaagtttctccagtaagttgaggttaatttattcttgaagaaagaaaatcctttctataagtttagtgtacagtgtttataacttctacagtagtgtatgataatggccttcacattcactcaccacttactcactgactcacccagagcaacttccagtcctgcaagcttcattcatggtaaatgccctataccggcctaccatttaaaaatctttataccaaatttttactgtgccttttctatgtttagatgcataaataccattgtgttacaattgcctacagtattcagtaccataacatgctgtacaggttgacagcctgggagcaagaggctgttccatatagcctgggtatgtagtaggctatataccacctaggtttgtgtcagtatgctctatgttgctcgcacagtgatgaaatcacctgaagacatgtttctcagaacataccccttcgttaggtgacgcatgactatattttttcactttttcacttccaaataacagcaagctacgtgaccataaaaacttcattcatgggccaaagccgtttgcacatgtatgcactggtccatcaccaaacatggaggaagagttaaacttggggatccagttaaattttgttcagcattcagtaccatctaccacactaagcgccctccctgcctctcttttgacatctttttctccccgctctcaatcacccagtgccctcagatcaccccattccagcaccttgttacctgttctcatagcaccttgttcttctctttctcagacactgtcatagttcaaattttatttctctcctactagactcccatctctcagaggggctggctctgcttttgctcaacactgtatgccagtttttggcatgatgtctggaacaacacagaccttcaataaacatttgtggaataaatgaatggatgggtggatggacagatgaatggatggatgaggtacatacactactattgtcatcccatggaattgtagcattagagtcttttgctatttttccaccatcaaaattcattggtcttattttccatgtatgcttctccctgctttctgagtctttttaatttattaagcatatttaaataaatactctcccaattaacaataggagaccttgtcaaacaaaacgcctgagatttaactctaatggtaagactccaggccttacggacctgtgaaaaaataataggttgagtcaggaagtccctttgataactcctcaattcagcaatgtataaaccactcaagtaaatcagggagacactgtactgaatacttaagagcaaggcttctggaatcagaggtatctgtgcaacattgggcacattgtttaaggtaccttcatttaatgttttgacaattttgatatataaaaagttaaatgtgggctgctgtgaggtttatgaattaagaagaagaagcctctgatcctcattcccagtccccagctctcttcgcattttagaatgataaagataaacactgtaaaatagcagattatttttcccattctagtcactggagagtgtttatttaatgtaccttacctcagtttcctgatctgtaaagcagaggtgatactagccaactcacagggttactgtgagaattaaataagataatccatccagaacacttagagtagtacctggcctgcctcaatcaatattagctattggttatgctaactcgtgccttgttttttccattctaaaccccattactaagtgatcatatgcttcatttatcaaatctaagcatctttctcaaaattcaagcccaggtttggcttgccaccattcagaaagctcacaagacttaacttttgcttgcaggcctgttcccaaagcagcattccaggtgctctggtggacaagatgatgtccccgctggagtggtgactttgaagaaggcaacctcgatgctgaagtgtaaattctgaaatacatgtttttttaaagaaaattagctgtgaaaaggaggtggactttgctgagaggagagcccacctaggaagcccagatgcctagcagatgagggacttgcagaccccgtcttcttttgggattttgggcaaggaggtctattcctaaggcaacactagcattgcacccacttattggcctcagtgtaaccaacaatctgtatcattgcctctgcccctgctaataagtctctctcacaagcatctttccaatactctattttagactatgtttatccttatgacaaaacgcacatctcattattaattgaggctcagagaggacgagcagctgttgtttctcactttgctttacaaaacttcaaaagcctccattaaactccctggacaaaagtgttcaaggggccacggctctcatgtcacttagccccatttcccctaaaggctttgtttatgtggaaactggagaaaaagggagagcagcaaaaaagaaggcaaaatttgagaaaccagacactgatgctgtgagcagaagccaacagaactgtggaatggtatctcccaccctttaactgaagcctgggtgccattgaaaagctagagaggacttgcaacaaactggtgggcctggggggtgggaggaggtagaatgtggcccaaaccccaaacttcccaggaaaattatcttggaccttttcaaaaaaagttctgcttcttggaaagcagctcacattaaatcagagccatgggcatgaactgcaggaatggcttcttttctaagctgtgtagaaatatgtgaccaacttaacttcagctgaggccagcttgagaaacagatcacattatagcaggctccaggctgcccacactgagaaagactcaggaaaacgttgtggagtgagtctgttgcaaaaatgtgaagaaggtgagattggtctttccctcctctcccatttttggcatttttcctatttttgaccagcttccctgctcactcttctgaatttcttccatcataggtttgaccagctgcttgaaaatcaaactgtcttttggtccttgcacctggtaggcacttggtaaatattggttgagtgaataaacaattttctactgagaatcctgatgatttgtaaaaacccatttattctttccaaacctttttgatcttgatgacctcatattatcctcaagacacctgtctcatgtttgccaccactgggaactagacatgaagggcattagtattaccatttatcggtgagataaattgaggtgtgtttggtcagggtcacgtggaaagtatttggagaagcaggctcagcatcagggctcctggcttgtttctcaatgccctttccacacagccatgatgcctcactctcaggataggagctgacatttattgagcgtgtactatatgccagacaccatgctaagagctatacatgtgttatctcctatatcacaaccatcttctgatgtgactattattatacccattttacagagaaggaaaataaggtacagagagagggggttaaagtaaggagagagggaaagacatgtagctcagaaatggtgcagccagggtttggcccaggatgtctggcacaaatctatgcacttaaccactatcaaattaccgtcttgagacaaaagtgatataatattacctggccaaaaaaaaatttttttaaaaagaaaatcagagaaagagggaatgtttactccaaaaggatggccccctaagggagaactcttgggtatttgagggctaagggaggcatctgggggtaaatagtactctatggaatcttctctgctccagagtcctcagtctttgaaatctatgtgattgggacaaattttgtaaggaacactcaaatgtattccagtttactgaaaattgtggcctgttgccctggtttttaccgatcctgtctaatctcttgcctaagggggtcaactgtaataaataatctatttttattcaaaggtccagtggatttcaatagttgtttccaaatcatgtctgctctcatttggccctgttttgattacaatagagaggatgatattgattttttaattcatatttcctctctattgatacatttccaagactcacctacaaataaaagagcaatattctcactatgagtaattaaaggattataatcagtttccctcataatattatacatgtaatgcttcttattgttaaaagtgcatttagagtggacatagttttaataatttttaaaaagggaaaaatatttcctatatgtcagtatttttaaggtaacaaatgaaagaaactcgaataaaaccaccacagtaatgaagaaaatgtattagttcatatgactaggaaactcaggagttgagtgggcctgagaaactcctaagactcaatgatgtcatttgccccctctctccctctttcattctctgtccccaccatctgtttctgcttctctggcatttgagcctcagtttcttccattaagtttgaatctctgccacgggcaggggcagagggaagagaagcatggcctcaaacagtttcaagcataatcactgctaatgaaagttcccagaggaaaccaagtgtcctagtctgtttgcgttgtcataaaggaatacataaaactgggtaatttataaagaaaagaggcttatttggctcaccattctgtgggctgtatatggagcataaagccagcatctgcatctggtgagggcctcaggaagcttacagtcctggcagaagctaaagggggcagcttgtcacatgatgagagagggagcaagagacagaggagaaggtgccaagctccttttaaacaagcagctcttgtgtgaactaatagagcaggaactcacttataaccaaagaaatggtgctaagccattcatgggggatctgcccccatgatcaaacaccttccaccaggccctatctctaatattagggatcacattttaacatgcaatttggagggaacaaacatccaaaccataccactggggttttctcactaagcataaaaataaattatcccaaggaaggatctacttggtttccatggtttaagtgtttaatgcttggccaatcatcatggtcactggggaggatttcaattggccaggcataaaacacaggctcactcctgtagtcaaggggtgagcactgtgattaacagcccttctagaatgatgggcagtgagaataggcacagtatcccgaagagagttggaagctgtaaggagaaactgtctagtgtcatatggggcattctgtggcctttgcagaaacataagcatcatgtcaggtcatctctaatgcagccttaatcatctgagcaaaataggagattttggctagaatccgaattcatgttctactctcccaattatacaccccaaaaactcacacacacacacacgcacgcacaaacacacacacacaccccttcctatatacttagtgagtgcctacaatatattagaaagatgcacaatgttatgtttcatgaagcacagactctacaagttaccaagtgtgggattgctatggcttgaatgtcctcttcatgttgaaattaattgccattgtgattatttaagaggtgggacttaaataatcccacctcttaaaaggtgggactgttaagaggtgattgggccttgagagctctacccttattaatggattaatgtcaatgttgcaggagtgggtttattattttgagggtcagtttttataaaagcaagttcagccttctcttgctcttgtgggttctcttgcccttctaccttctgctgtgggatgatgcagcaagaaggcccttgccagatgccagcagcttggtattggactttccggcctccagaactgtgagaaataagtttcttttctttataaattaccaaatctgtggtgttctgttacagcagcacaatatggactaagacagtgaccttgaacaagttactcttcctcttcttacttcactttcctcatctctaatgggaataatggtattctgtacctcataagatttttgagaggatacatgtgttcatatatgtaaagtagtcagtatagtccctggcacacagcaaatactaaataggtgtttattgttattagcattcatattagtattgtgtgaccttggacaggttgtatcacatcttcaggttgtacctctataaaatgggaacaatatacccatttcaaagtgtgaagtttaggttaaaattgcacatatagagcacgaagtatattgcaaatgaataagactggccattataaagtggaaaatgtaattgctttacaactcctgaccccattcctgggcccttaccatggagagagagaaaaaagatcttgtggtagaccacaaccttgcagatgattcccttcccagcgaatgtaatccagtgttactcctgaatgtccagtctctacaagtgcccaattggtctgttcctgtctacaaatagttccaacattttatctaagtaaattagcaaaactcatgtacttctgatggaaagaaaagacaatttctcaccatttcgacgatatttgactcttctcttttcttgcttcatatttcctattccaatccatagaaccttgtttgaaattttagccttaaaattgactaataaatactgcctaaatcacaggccacaaaaactggtgacaagttaagcatatgataacaattaagatggtacccaagctaatctttaacattttaaagtttctttaagagtgaattcacagctgtctcctgcatacacctttgtcttaaataatttctggtagaattttatcactttgtcatctttctgatgtcaaattactcttaaatctcttttcccagaaacagaatctggctttaagttcttagagtcggaaagtaggccaaataattggataaagcaagaccctgggccactttgcaaagttttgcctgagccaacattatttccttatggagcttttaaaacttaaacacctatatattagtaacaatgctaggcagtagacgggactcttggactagaaagcgaaatgttggatataggcttttgttttgttttgttttgttttgtttaaacagctttattgtggtgtacctggcatataatcaactgtacacattgaaagggtcaactttgctaagtttttatggattacatatacctgtgaaatcaccaccacaataaacaaaaagaacacacaaatcaccctctagaggttctttatggcattgtgatttctcttttctctactcctaaaatgttatcaactctttccaagttaaaaaaaaaaaaaaacaaacaaacactatttctttataatgagaagcaaagattttaatacgtatttgggaaagctagcgagaatcttagagtggggtgataactctttcacaaaactgacttctagatctgggagaggaatgattattcaccccattttgtcaagtgtctgctttcctagctgaagctctgccaactatgaaaagatgtttggggccaggcatggtggctcacacctataatcccaacactttgggaggccgaggcaggcagattacctgaggtcaggagttcaagaccagcttggccaacatgatgaaactctgtctctactaaaaaatacaaaaattagctgggtgtggtggtgagtgcctgtaattccagctactcgggaggctaaggcaggagaattgcctgaacctgggaggcggagattgcagtgagccgagatcgtgccgttgcactccagcctgggcagcaagtgagactccatctcaaaaaaaaaaaaaaaagaagaaagaaaaaagaaagaaaaagaaagaagaaaggacgtttggggggatgaatgaccttgaagcatttctgaacactccataaactaggctcatcccacctgatgggtctttttgaggtcatattataaacaaatatggggggtcatattataaacaaatatttaagaagcaaagtacattgactctcggtgacctttttggagtcacagaaagtcaccaatgaggtggagggctgtgaagacaaagtcccctgacttctgaagcagaatttaacaagatttaacagtcccagataaaggtcaagacatgtacttagaaactaaaagaacaaaaagatgataagaccaaaggaagcgttcatccttttctgagtcactgcagcttctgagctggagcctcctgtgaaggactgaagaattatgaaatgttttggctcagaaggaggaaggagtgttcaccagattgtcttgcaatgtgcaaggcaggaaattatccatcaggtgggagagtataacactgcaattccattcacatcagactccattagaaaaacgaggggtctaggtggaaaaatgaaacaaaacaagatgaaataaaatgaaattgaatgagatgaactgaggttggagtgagggtttcaggaagctagaagcatttgaaaatatgtcaattccatttactcctggaccttagaaatattggttttctattattccatcccagagctctgattcacatctcttaaattccttggaagtctaagagtgagcttaagaggatggggaaagagagcacccattgatcagggggcaggacataatatgtaattttcaaaataagttcaatatgactgaatcgaaataaaatgcagctttgtcagtcagacatgaaaggacttgaatcagcaccaagtgtctttccccgaaaagcatagagataccaaaagggaatcttataaagaagttttaaaattcagaaggagattggaagtggcagtcttaaaacatacacaagatagggtctgtagacaaactgggcttattgaactctttttgtcttctcttttatttttcctcttttttcataaaagctgataaatatctgtgtgcaaagacagtggggaattcaagaaacattttctatctaaaataaacagaaatcttgcctactgcatgtgaaaagccttttttccttaacattgatatagtgagccagccttagttcagcctcagaattatttgtctaggcataaagatgaaaagcctcctttttgagcaagcttgcttatcactgctcagagactctctcaaactcaggaggagccaagcacagatccccgtcattaaatcagaatcctctctgtgcagagcaaatggatgtttcagttctgtcttcctgagggatttgtagaagcatcccagaaaggagcagaagtactattccttttcccagaagagggagagagagatgctagagaaaagcctccattaacctaggcagtttaacattccttttctttcttttttatcgttatatttcccatttaagttcatttgtgataaactagaaactacaaatgggcaaaaaagaaaatcactgttaacatttcttgaatattcctcaaagcctttatatataaaaccaaatgggagattacactaacctcttatttatattttaaattttctcacttaatgatgcatgcaatgaaagtgtcataatatatttaactaattctcaattggacagcttggttatttccagtattttcttttctttctttctttttttttttcttgagacagagtctcattctgtcacccaggctggagtgcagtggtgcgatcttggcttactgcaacctccgcctcccagattcaagtgattcccctgcctcagcttcccgagtagttgggactacaggcatgtgccatcacactcggttaattttttgtatttttagtagagacgaggtttccccatgttggccacactggtcttaaactcctgacctcaattgatccgcctgcctcagcctcccaaagtgctagaattacaggcatgagccaccatgccaagccttatttccagtattttcttatcaaaaactccccgtagctaaatatttcctaacttatttctctaggataaatttttagaggggttgagtcaaagatatgtatgttatgtggcttcttagaatgattgttgccaaattacaactttctcaacatttaacccccactctaagttttatcagtctatactcccttctcttatactcatgactaacactgggtattgtctgtcttttgctaattcagtatagcaaaagttgtgtctcgttgttttaattttgtttctttaattactagtgaggtcaaataatttttcatatatgtattgtccatttctttttcttttattaatttgctattcatgcttttatcccatttttctgttgtggtattcatctatttctttgtaagaaccttttatgtataaaatatattctttttaaaataaatttttatttttaattattatgggtacatcatagttatacatatttatagggtgcatgtgatcttttgatacaagcatacagtgtataatgatcaaatcagggtaattgggctatccattgcctcaagcatttagggagaacagtatggaggttactcaaaaactaaaaacagaactactgtatgatccagcaatcccacagcaatacacaccaaaaggaagaaatcagtatatcgaagagataaaaggtattctttatcagattttaatacgttatatagttcttcaatttttgtcattttccctttaacttttgaattgtgcttttgccatatgcattcaaattattttttcagattaaaaaaatggtttctgaccttgtaaacatgcttacaaagttctccacttatctctgctctccacgaagagatggtagcttttaaacaagcctatgaacaatgctttgtcaaacttccatgactattcttgatacacttttgaactaaaagagcagaggcagaaaatagaagcagtaaagcttaaattacaatggaacaacatcctatatgtttttgcttactaagattgacttgcttttgctaatttgtcacagattatgacaagtccagtgaagccgccaaatatacactgatgctgacatgcatgcttattcttcttcatttcaatgctcagattcatttggatccctgtttcctttgggagagctctgaacagacaaactctcctgacttcaagctcctttctctgagcttccctgggcatcttggatgcttaatgcagtttatttaactagagtggctataaagcagagctgaggcaagaacttctttgttaacagagtgtttctcagagaattgtttgggatgcaacagtcatggatccatagcgggtggtggaggtatattacctcaactcaggatcatcatcttttcacaggctaaaagtcgtggaacgattggcttctctcaatttcatagtggagcatgcactttgcacaagagaagtccattttacccaaatgggattatttcctatagcaagataatagccaataggaaaacctcgccaatgttagaaatccactgtactagacataagtctcagtgtctggagtatatttcagttgtttgtgcctgcccagcacccatttaacctttttgctttgatggaactttgatattccttcaggaaatcttaccatcctcactttccaaatatataattccaaaacagagagtggagcccatcccctgaagctagcacagacataggagccagacctagccaatcagagccatccattcactatggctccagtgattggttcaaaaacggacacacggcccaaactaaaccaataaaactcaatacctagactttcacattcttggaaaagaaatacatcctttccactgaagataccaagctgatgagttgagagcctgggacatttggttacaaccttgctccatcctggctgagcatgactgaatgaaagcagcctagaaagtcttccaagaaacagcacatggcttagtcctgatgacaatagtgactccctagactgactcatgcctgaaattggtatcccctaaaactatttccagagccaataaactcccttttctgcgtaattccatgtgagatgaatttttaccacctgagtaatattgttttaaatgacagcttcttattagctctgaacaccttagcaataatgtcaagagtggaaggagtactggtttgggagtctgggttgtagtcctacctccactcactactttcacatccttgggctaatcgctttatctgtgtgggctcacttttctcatctgtgaaagaggttattggaagagaggaattctaaatgtccctttgaaggccataagtcttgtctctgtgataacattgtatcaacacttcaagttaatctgaggttctggctccaactgccacctccacaacccagtgacaaacaacactgatttatcttaaaagttgaaaactaaaaggtccataatatacttttagaaactagaagatagaacaaaaactctgtaaaacattgctaggatgtagatttctccagaagtgtattaatgaggtgagtaatatattaatacattaactatggtaactattgtatagattagtcataaatattttgttttaaaaaggtctgccactccagttttgctgagctaaagtaaacgaagatccgagttatgtcaacagatgacacaagtgttcagcagtgaggctgtttgttctgaggagggaaacaggaagggaagctggtcccactcccagttcttcttcatcagacctccgttatttatttgatgaattagcaatcctcacaacttcagacacgatcacaaaatgatattttggaaatgctactcggactgtataattcttccaacccttcgttgattcccaagtgccttcgggacaaagtgcaaacccgttggcgtggcacatgagccctctgttatgtgagcctggctctaattccacatcccagtgtcatctcctcccactcctctttatgtgccttacctaaactaagtaaagaggttaatgcatagaaaatgctaaacatctggcataatttctggcatttagtaaaggcttattatacatgttggctgtcattatggcacactagttatactcacagttccctaaaggtgcagtactggtcctggatctgtttgccctgaatccatcctccctctttgcctgctgtgttttagttcacgatggctgatccttgcaggctgcagttcacaggctcttgtgtctcagacttccagctggttgggttaggccaggaagacacactggcaaaaaatggagggtagaaaggagggagaagccagggtatttctctccttgtttccttgggtgatttctgcagcagtgactgtcttctctgtagttccagctcttgccaaaacaggtccactgtggttcagcttctggttccttcttttttcctttagcagagtcggtagtggcttcctgcttcttgatgctaatctctgcattgcctcatcactcgtgttaactctcagcagctctctctaccatatagccaatcccctgctttccattccctgtgctgtacatccttaaagaggtgcctgttttcctggagacaccctgactggtttgcatagcacactctcataccttggacctttggcttttgccttatttcagcctcctcatccttaagaccaactcctagccatcctttcttctaccatctttgttctaccaccatctcctcttggaagctgtctcagtttctccacctgccacttcctgaagcgtgagttgggtattcctcttctaaacgcctctctcctaacaagtggtttgttcttggaaaactccagtacagatttaattttcttaagagcaagtgcactgtcttacacaacatggtatctcaaaaccatcctatggaagatgttttctgaaagaacgactaaatgcataattcaataaacacttttcaaatccagataaaaatcaatgcaaactgtccttgtggcagacaagggacagtttacaatgattcactcaatatgattattgagttactcattcaataatgatatccacccctgcctttttttttttttttttttttttttttggccaatagagctctagttctgtttggaacatcaatgtgcccagctctgagaagtacttgttttcccagcctcccttgcagctcaaggtggccatgtgacagtgctgttgatggaacaagtggaagactgcaggggaggattccaggagggaaaaagccactctctctttccaccctggtttttctgtgccttgaatgttcatgtgatatctggagctattgcagctaatatgaaactatgagacaataagtgttgggggaaatctgacacattaagatagcaaagcaaaagatagaaagagtatggttctcttatggcctctttatctcttttttcttcttcttacggtctcttattgtttctttatctctctctctctcttttttttttctttttgacagggtattgctctgtcaccccagctagagtgcagtggtgcaatcctggctcactacagcctcaatctcctgagctccagtgatccatctcagcttcctgagcagctggtactacaggctcattttgccatgcccagctaatttttattatttgaagatggggttctgccatgtttcccaggctggtctcaaacccctgggctcaagcagtcctctcttcttggcctgccaaagtgctgggattacaggtgtgagccactgcacctgtactgggttcactgggtttcttgatatgagagaaaaataaactcttcccttcaattcattgtttttgatttttgtcacttacagccaagtacatttctaacagataggatatgccatttagggataatctattgctgttctttttggtcattccagtaaaggatgacagagccacaactttattatctagtacctgtgactaatttgaggagcccaaagaaaataataggatgatgagcatgatggttaattttacgtgtcaacttagctaagccgtagtagtacccaggtatttgatcaaacaccagtctagatgttgttgctataaaaataattttagatgagattgacatttaaattagtaggcttcaggtaaggcagatccataatatgggtgagcctcatccaatcagttgaagactttatgagaaaaagactggcatccccgagaaagagaattctgcttgcaggctgactctggactcaagctgcaatagcaactctttcctgggtttccagcctgctggcctgacctgtagattttagatttgccagcccacaattgtgtgagcattttttttttttttttttgagacagggtctcactctgtcacagaggctggggtgcagtggcatgaacatagctcattgcagcctcaacctcctgggcccaagcagttctcctgtctcagccttccatgtagctgggatcacagacattggccaccatgcctggctacttttatttttattttctgtagagatgaagtttcaccatcttccccaggctggtcttgaattcctgggctcaagtgatccttctgccttcgcctcccaaagtgctgggattacaggtatgagcctccacacccagactactttgtaaaacaaaactctgtctgtctttatatatccctttctctctctctctctctctccctccacacacacaaacacacacacagacacacacacacatcaccaatagaaagtatagattttcttaagagcaaccacactgtcttatatatccatcaattggttctgttttgctggataaacctgactaatacattgtatataaagaaacttagggaaagaatgagctttgagcaggaaacaaggagcccttgggatttatgccttagtataatagaaaccatgaaggattatcattccaaattttattaagcatgtttataatttttttcttttcgatattttggccaaagaaaaacctgatctatcatcttcatctcttttgatgaagaagtagcctacattccttccaggctcaattttattaaacttcagcactttccttctctcctctgtggagtcgcatctgttaggacccagtggcaagcatcttcacaagccagttttctgccaaatgcagatgggagtctcctggccatggggtctgcatttactgatctgattctatcatccaggggggttcttcttgttgtcagagtggaactgtagcctcttcttctgctgcttggaatgaaaggttatggtatgaaaagagtctgtcaatgggaataaattatttgtgaaatcagattttagcattttaacttctgagcatcttgctggattggattgctgaaaaatgacagcatctctgagtcgtggaatgaaaggcatatcaaagtgcagatgtgaatctagttctcacttgttcttccctaatggttgaatactgtgaaaaaggctggcttcaggcagaatcagacagtgtggagatttgattcaggcatccaggtctattttatgtctttcagccatttagtcccttcagtgggtcctctcctctgtgaccatcactgccatctctcctctcctgacagagacagaggcagaggcacagaagagagaaaaccccttcccccctcagaacccttcccctcccagagcctcctttatgcagatgataatttaatcagaaaactgagtctcattaaacgcaggttggcaaattgtcgttcttgagcccaatgtggcctgcttaccctctccagttaaaaaaaaaatgtgtttcatattttttaaatgttattataaattttaaaaagaaggagaaaaatatgtaaggaagaccacatgtagcctataaaaccgagaatatttattctctggccctttgcagatagtttgcttagcgcccttgattctagagggtgaagcttttagcagtggaattgtaggcatgagtgaaggcatggaagaattttgtggtatgaggctttggccagccctgtttagtttgtttaaaaacaaactaaaaaaaaaacatacaccgataagttgtggaagttttttaataactcgtccacaggaaacggatgcgttgttgacagatttctgtggctggggaagagcctgctgcctttattatcatggattctcctgactatttcacagtagctgtttctgttaatatatacctaccttgaaccaggtagtgcccaaggtacttttcatacatttagcctgcgtaatccccacaacactctaagaggtaggtgtagttactatccccattttgcaaataagtaaaacagatcttagagattgaattggtcaaagacacacaactggttagcaatttgggaccactggcaccaacatgtaaccaccaccctatactgctttttagctctgatgaaaggagcatgacaggttttctttctatagcccagtggaaggttcttgattcttaagcctgcttaccaggctcctctgttttccatcctctggctccagccctctgcagcccaccttctctcctaacataggtcccagtgtgggggtggagggagacgcaggcagtgcaatcatcgagctgtgttgtgcaaccatataatatatcccagtccttcaggaagtttgacaaactggaatatgtgtttagatttctaaactcggaggcatttcagagcaaagaggatctggctgtgtcctccagatggttacaaatggttttactctcctgtgtttggttggcttgcagctgccacaggaatacagctgtttacagagtctgcaaaagggaatatgcagggaatgtcaatgtcatcggcctgcttctttctccctcaggaagggagaacagtctggcctgagagtgtctgatgtgagaacacatccaacaggatcaggaagaatttattgagcggtcacagagggtttgaagccccaacacaagcctggaatgcagtgtgccaatgggcatgcattaggctcctatggttgccatcacaaatgatcacaaactgggtggcttacaacaacagaaatgtattctctcatagttctgaaggccagaagcctgaaatcaaggtgttggcagggccacactctctctgagggctctagataagaagccagtctttgtctcttccagcttctggatcagctgcaccctccaatctctgtgactatggtcacattgtctctttatcttctgtctgtcttctcttctttgtgtcttttataaggatacttgtagttgaacttaagatccattcagatgatccatgatgatctctgtatcttatgattcttaactaattaaatacatatattttttagatggagtctcgctctgtcgcccaggctgaagtgcagtggcacaatcttgactcactgcaacctccacctcccgggttcaagcaattctcctgtctcagcctcccaagtagctgggattacaggtgcatgtcacgttgtcaccaggccaatttttgtattttttgtagggacggggtttcaccatgttggccaggcgggtctcaaacttttgacctcaggtgatccacccaccttggcctcccaaagtgctgggattacaggcataagccactgctcctggcacctaattatatttgcaaagactcttttcccaagtaaggtaacattcataggttccagggatcaagacaaggacatatctttttggggccaccattcagtccactgtaggtgtgtattaacataggagagaaaaagagaggacaggtcagagaaggaaccagttgcctacacagagattctaccatcaatcaggccagcctttaatcatattttttggtcaaggggaaatgcatcatttgccattagtagtgagtatcaaagatacagtgacctcaacaatgcaggtgcttatatttaccatgtaatgaaaagttaagagatagacagcctaagactattatgctgtctcatcatcacccgggattcaggcactgtctatccttctgcccctcatctgtcaatttggccgtagtccaaggcttccattcttaatatggccacatgattcaactagggtgctggagcttcagccatcctatctctatttcaggcaggaaaaaaagatgggaagggtaaatggcaagtgcctgctgaactagcctacttacagagcttcggagagggcatcccagtgcttacatctcactggccagaacacaataacccctacctgtaaggccaactgggaaaaatagggatgtgtgtgtgtgtgtgtgtgtgtgtgtgtgtgtgtgtgtgtgtgtgatatagttgttagatgtgctgctaaagtgaataaaatgaagggataattagtaaggatgtgggtaggcaactagcactctctaccacgggggctctataagtcataaaagtttttgtacccatgtggcaaaggcagagaacactcctttatcttataataaaaacaaaaatagttaacatttacttagtgctcagcacataccaggctctgggcttggttcattacagattcattaaacctcacaacagctcttcgaccctggttctatgacagcattcccatttccaaatgcaaacctgaggctcaagggaggtcaagcaattttccaagggtcaccaggctggaaagttgcagaaccagaatttgaaccagatctgtccattgggaatccaagcttcataattgcgggaccacatggctatgctgtgctggggccttgaaggggcttgaggggaggactcagctccttctgtaagcacagtgactacatggcggcaagggtgccctgtcttcctttttacatttattagacatgcagtattgacttggcaaatctctgtgttgtgtttcactcctcctttaaaaatcctttcttaatctttccacctcctgcttagctcacagcctcccacatatatataaccccttggttgtgctttactgattgctggctgattgacacatggagtggcatatggattctcccagacacagcccactggccatggtgcagctctcagcttgggaaacctctgctccttcccagtgcctgggcgttctgcttacttcctacctgcatgcctttttacctaccagttcttttttctggaatcctctcccttttctctgcttatcctaaactcaagctgcttcctccaagacccaaatcaagtgtcctttcattaggacgccttctttctcagaccacacttgctggcagttctctctcctgtcttctctccctcccctctccctttcaatctccctcactgctttaattctcagcacctctttttgtaccactcagccttgggttgcctcatgtttttgtccttatggcctacattaggctgtacatatcttgaaggccagtagtgcatctcatgcttctttatgtccctggattctccccacaccctcatcaccttcattcccacctccctcctccacctgaaatgcaatcacagtgcctcttagcaccacctcagtgagttatggaccccccctaaagagctctaacacacaaatacacacatgttccatgagcatgcacatgctacaatccagctcccttagccaggataccaatgataaagacggggtcatgccaaacaggagcaggtgcaactcatcttgacgtggtttatccttccctcctgggcccccttctgatgcacagctgccggcagccctccgtgcatatggggccctgccagagttgagaaaatagcacaggacttgtttggccactgtccttttagccttagctcaccccaacctacaggaaagacttacactactaacaatccacttacttccatttgtgggactgtttacaagcatcaggctctcctggatttgacctggacttagaagcagtgagaccacaccctcatctgtggtgggaaatgatgaagccgtgcccagtataccctgtacaacatctttgttctccagtatccctgaaagcccatttttcctgaactttaccaagtgactgacatttctgtgtctcattactacctaagtgaggcctccaacagagtggaactcaaagagtcttagcaaggacatgaggccaacagtacagcatgaccaagcaaactgtgttttcctggactcttctgatgatacccaggaaagatgaagctcatgcccaggtgggcttgctgcctctccctacctttgctttctgccctgggcttctgagttggcttcacagattagtgttgggaggaacaggctctttgttatccattgttaacatcctttgttaatccattgttaacaataccctttgttcatccattgaatagtcctccttcatccactccattgtgagtgactgcatttaactggatgtgggctagcccaaatcccatcccattcagtcttaataggagtaagatggagaggatgttaaactaagatattcccagagatattgctttaataccctgaacactccttgtgattcacctagagcctgcagctgaataaagacttaaactgtcacggactggactgcatttattagacatgtgcctatgttccataaatgggataagcccctgataggtgagtcagcgactgtctaatggatctgatgccatctcaggcacctattcaggtcctggagtcaggagcatcttagtccaccttcttgtctttggatacccaccaacccctccctggagcctcacactcagttaccaagtcctgtagattactcttttgcaaaggcaaactttgccttcctatctgtcatcaccaccactccaggtaaggcatttatctcctcacacatggagggtgaaggagtcagaagcaacactgcaatttgccttcactgtacctccctctacctccaagtccctatgtatctacaccttccttctcctcctctcctcctcatcttatctacctgtttgctctgccccagttgtccccactctctctctccctcactctattgtctctcattctttctctattgaggaataaattacagatcttatatggggaacttgatgagctttgacataggcatgcatcctcattaccaccacccagccatgacatggcatccctggcacctagaaggctccactgtggattttcccagctagttgcctctttgggggcgaccattattttggcctctatcatcataggttatttgtagctatttttaaacttcgtataaatgcaatcgtgcaatagcaactcttttgtgtttaaactattttagttttgtacttcttttactcagcatcatgtctttgtgattcatccatgttattcataaaatatcattattttgttttttctttgctgtgtaacatttgttgtatgaatgaatatgtcataatttatgtactcatccctttctggtagatatttcagttgtttctagtgtgaggctattacaaataaagctgctatgagcattcttgttcaagtctttatgtgctcttaatggctttccctaccaattctccactctagttttcaaaccctccctttcccccttttatcttcctttcagcctacacacagggctagagctcttctaacttaaaagaaaaaaaaaattcttcattcaaccatagactacctatttgccattcttcctgtctccttcccttgttcaccaaatttcctcttggaagtacagtagaaccctgttgtcgccatttctgcagtgcccacctaaggcctaatctcttgtaaggctagacctgcctttcctcctgtctcccaggctaccgtattagccccgcttcacctcacactcaaacatatgtacgtctcctctactggagctagtggtacaatgacacctgggatgctgtttgtcctcccacctctcttgtccgcagacccaatcctgccctctgaaattgactactaatattatgacacggacacacatggagtggttttaaggagcggagagtttaataggcaagaaagaaggaagaagctcccccgtacagagacagaggaaggggtgcttcaagcgaagagaggaaacatgtgggaattgccatgtttggatggacccagtttctaaaggccggtatttgctttttttttggaggtggggagggggacggagtcttgctctgtcacccaggctggagtgcagaggcgcgatctcagctcactgtaacctctgcctcctgggttcaagcgattctcgtgcctcagcctctggagtagctgggattacagccaggcaccaccacacccagctaatttttgtatttttagtagagacagggattcaccatgttggccaggatggtttccatctcctgacctcgtgatctgcctgcctcagcctcccaaaatgctgggattacaggcaccgtgcctggctggcatttgcatattaaagcttgctggtctggctttaagagccgggcttttctgttagacaagaaacgtttctggagctgctttaaaaggaacaaaaactttccaaggactccttttaccctttttatttgcctaaaataattttttataacttttatacactaatattacctcctttcttccctcacctgggaatcatcccacccccgctgcttgtcgttcgagcctcttactgcatttacccctctccacctcccattatagttccttggaagtatgtcacactttgtacctggcctggagtctctgacagtgtaacctgtgtctaagttgtccctgatttatcccagcacctagcacagtgatggcactgagaagatgttattaaatgaccacttcctcactttatctgtattatgaaaatgtcacctctgaagttcatctgaaaagtgtaaagctaatgaacaagatgaagaaatcccttttttgacatggttgtcagaattaacagactcacatggccttggggttggtgagtatgttagtacctgagtgtgtggggctatttgagaccactcagcgagtctcagggattcaggaagttgcaaaggcccacttagtcctgattcaaccctactgaggatgacaatacttacaggagaacagaagagggaagccctgggcaggcggctgactgcagctcatccagcctcgcagaatttccttgtgatgtctcatggtctatttttttatcctgatatttttactatttgctgacagctggtttttctatttgatttctgtccatgcgcaccagattgggatcaaaaggaaccaagtttatccttcactttcttcctcatggtcttgaaatgcaagcaacctaaccaaacccatgatttaccaaaagttaggtgggtatgatgtcatttttggatgccaaacactaaattttgttaccatagaataaccctgtagaactctgcccagcagccatggaaatcatgtcctgtaggggaacacagccttctttgtaacacctatgtgaaggcattttcattccctccgtgggccatccttaagagactggctgtgaattaccctctcctttccaatgaacactaccaaaagggcaacattctcagtttgtccagaacaaacatttcggaagaagggttagtttaacgacttcttagtttcaccttttaatccagaaatattttttattccatgatctgaatatcaaccttggtttttatcgtcaagagagaaaagaaaaggtgataaaaatctgtttgagacacctccaagatgagacttgtcattaggaatccctgacatttctgggaggaaaaataaagatgattaagcttttacaaatataaagagactttattttttagagtagttttaggttcacagcacttttgagcagaaagtagagttcctacatattccctaaacccctcaccacacacagcctcccctgctatcaacatcctgcagcagagtggtacattgattacaatagatgaaccaacattggcatatcattatcaactaaagtctatagtctttgtcatccttcattctttgtggtgcacaacctatgagttttgacaaatgtataataataagtatccattattttactatctctctttttttttttttttttttttgaaagacagagtctcactctgttgctcaggctggagtgcagtggcgagatctttgttcactgtaacctccgcctcccaggtccaagtggttatcctgcctcggcctcccaagtagctgggattacaggcgtgtgcccacattcctggctaattttgtagttttagcagagataagttttcaccacgctggccaggctggtctcaaactccttggccacccgcctcagcctcccaaagtgctgggattacaggcatgagccactgcgcctggcctattttactatcttcctgaatagttttattgccctgaaaatcctccgcacttcatctattcatttcttccttcctcctaacctttggctaccactgatctttttattgtcttcataatcttgccttttccagaatgtcatttagttagaattatactcaatgtagacctttcagattggcttctttcactgagtaatatgctttgaagtttcccctatgtcttttcatgacttgatagctcatttcttttcagtgctgaataaagttccactgtctggatgtaccgaagtttgtgtgtccattcacctgttgaaagacttggctgcttccaagttttggcaattatgaataaagctgctataaatgaacatgtacaggtttttttgtgtgtagacatgttttcaacttttttgggtaaataaaaatgattgttttttgaaacaaacttgacagacaccatctctgatcctccaccattataaacaaagcttcagcacaacagcaggattaaatactctgaagaggattgttctgtgtactgtggaggaggatacagagaagagggatacagaggataaggtgtctctgaccttctttcattatatggaaaagaaagtcaacatgtcaactcactgagaaacacaccaacatgtaatatgtggcagcatgtacaagagaaattctaaaatgaagaagtggaagttaaaaagctacaaaaaaaaattaaaacacacacataacagaaggaaagagtaagaacaggtgtgacctactttgaaagttaacatgtgggacatggatggaactggaagccattatcctcagcaaactaacgcagaaactgaaaaccaaacataacatgttctcactcataagtgggagctgaacaatgagaatatataaacacagggaagagagcaacacacaatggggcctgtcgggggatggggtggggggagggagagcatcaggaaaaatagctaatgcatgccgggcttaatagctaggcgatgggttgataggtgcagcaaaccaccatggcacacgtttaccatgtaacaaacctgtacatcctgcacatgtaccctgcaacttaaaataaaaattaaaattaaaaaaagaaacttggcgtctattctcaaatacactgatcaacagtgtaaagctaaggatggttgtcttggcttcctctcaccctgtcagtgtctctccccatccctcagtgtcctaagtccagggggacatactgtcagcccctgagcatcactgccaaagagtagaaatagcctgataaaccagctcacctggaggagttaatgaacctgtatctaaatgaatgtattgtcctctgtactaggctgaatggtggccccaaaagacatgctcctgtcttaacacctggaacctatgaatgttaccttattagaaaaaaaaaaaaggtctttgcagatataattacattgacagtcctgagatgatatcatcttggattatctggatggctcctaaatctaatgataaatgtccttataagagaaaaacagaggccgcggacggtggttcatgcctgcaattccagcactttgggaggccgaggcgggtggatcacttgaggtcaggagttcgagaccagcctgggcaacatggtgaaaccctgactctacttaaaaaaataacaaaacttagctgggtgtggtggcgtgcacctgtaattgcagctactcaggaggctgaggcatgagaatcgcttgaacccgggaggtggaggttgcagtgagccaagatcgtgccactgcactccagcctgggcgacagagcaagactccatctcaggaaaaaaaaaaaaaaaaaaagagacaaacaaagaagacaggcaggagaggaagagacaatgtgaccacagagacagaggttggagtgaagtggcaacaagcccagcaaagctgacagccaccagaatttggaagaggcaaagactggcttctttcctagagcctccagagagacagaggccctgccgacaccttgatctcaggcttctggccttcagagctgtgacagaatacatttctgttgttttaagccacccagcttgtgataatttgtatcagcaatcacaggaaactaataaatcctcctaaagacactctaactttaccaaacacagtatattagttgataataattatgttagatatggtcattctttttggctatccagaatctgagtacactccctatgttcaggattgaggcatatacaacagatatgatataatttcatttaagtacaattattcagtctataaggtttagcctttcacatttggttgaagacctgggtgaactcggaagttatactcactctattctttttcattatccttatgtccttctattcaactgaaagttttctgagtgcataaacctattccccataatgttcaggagcacataataaagagtggttgtgctgttaatattgtttgaccagaaaatagagagtctaaatgtcctctgtgaagtaaggaggccagtgatacccctagaaataaaaatttttaatgactctctccttctggtctctccctcttcaatctatactttctactgtagccagactgaattttctaatgcgtaaatataatgattcttaaatactttcattgttttccatactatacaggccagagttgaaaacaccttcacaaggagtttggaagggacttcataatctggcttcaaacttcattgtaggctaatctgttgcttttccattctcagctcctatctctcattacatccctcctataccacagccaccctcaaactgtgcatgcctcaagagcaccatgttttctcaggcctcggctgaaatactcaaaaacccccaacatgctggcctcttcacctgcaacacaccatttctcctccctccaatgctcattgtggcagaggtgatgctttgtatgtaacaaaccatttcatttcctcctgagcacaccagaagaccacattttctgatctctgtgcatccagctggtgtcatacatctagttctggccagtggtatctgggcggatatgatgtgcatcgcctcctgatctggcctctaaaatgccccatgaggattccctatgctgtctccccctgctcaccatctggtggctggtcattgaagacttcaaggtcccagtggactgtggagccatgagatgcaaggaccttgggtctcaaaatcaacctatggaagaccacaggcctaacactcagttagaagtgagaaagaaatattttatttcgttaatcactaaaatggtgttgtttgttacatcaatatcctaccctgactaatacatccatccttgaacagcagctgagtatcaatttctgtgaattgatctcaactctcctagaagttaatcattcctttcttggtactttcacagcacattgttgttgtttaaataaaaacttttagaagtacggttaatgatagaattaatagaataatattatactgcttggaaaacagtttttaaaaaatcattgataaggctgtcattaataataactttaataatttttgcataattcctttctctgtttaatagtcacatgcttttatagcatattttaattaatgtactttttatttttatatattttttctttttttagagatgggggtctcactatgttggccaggctggtcttgaactcctggcctcaaatgaacctcctgccttggcctcccagagtgctgggattacaggcatgagctactgtgcccaaacatagcatattttaaaatataacctttatttctctctcatttcaaaaattattttaaagtaggataaattttgtatagttttgtatcttactttttctcttcatataatgatataagcatttttccacattgggagaaattacatagccattattcttaatgactttataatattgcattaaatggattggctgtaatttaattatccctctgtttgagggcagtagactattttcatttgtattatagagaatactgttatgaatatctttacaaataaaccttttcatattttggttcattttcctaggaaagattctcagaaatgagttcactattatatttttataagccttatattatttccaaattgctctctagaaaaggttatattaattagagtgccaagagcagagtgtaagaatgctcacattactgcactccctttgattatttatacttccttaatttaattaaagattgaagttaatttacattccaatttactttcatttgattactcattaagttaaacttttctccatatgattgtttactcacatttttaatttggttaattatctgtttgggtcttttatatcattgtctattattaagcatcaatttgtttcttttgcctttgttaataacttacttaataaaggtatcaaccctttgtcatataatccctagctgttaaaatgtcctcattcaacaaatatttattgagcactgttatgtgtcaggcactgtctaggtactgtgtgttcacatcagtgaacaaatcagatagcaatgtttctgtcctcatgtttcatctttcttattagataggaattgttgtttgcctcactcccaagtacagtgtgagcatccagaggtcagggatgagattgtagcttatttatttttatttttccatcacgcttcatcacctgcttattacatagaagatgctcaatgctggtttgtgtatagagaggcctgcagtgcaaaatgttcaaaatgacgtttccagctccctaacatctgggtatattttagcttaatgctttgcatccaccataataaacactggcttttctactgctgccaacccaagaaggatactatctccatgattattccaccttggctgcccaccaggctcacctggagcattaaaaacaacacaaaataaaaacttcatttgtagcacctaccctcagactaagtaagtcaaaatctccactgttttttaaagctcttccgtgatttcaatgtgcagctggaattgaaaaccactatggtgtgtgactctgatgtttgaaggagattcaggtgagaggaactggaaggtgtttcttgtagttggcaggaagcagaggtccttgcgttctttgcctctgttcctctctctttacacgtaaatagcacccattcatctagatccttctctcatggagagtaactttaatgtggacaaagtccagagccaatatttgatgggaaggatttttcattatagacacttggtataatcctgaaaactacacactaatggaagcccataagggcaggaactttgttctgtttctattgtatacctagagcctactgccgtgtgtagggattcttgctacagtacttaccccatcctgactaatctacttcttgaatcttctgtgaagtcttctccgattctcccagagatgaatgaaactcatcgacaaggtatttttagcatctgccattcacagagacagaaaatgttgtgatccaaatggcagccgttagtgaggattcttcttactggagttacttgtggcagactggcattattgggtggcagggtatcagtgggtaggttcctaaagtctggcagcagatgcaaacatggcagccctgcctcttctagaaggctgacttcacaccagctactgccaaagaggaaacgagggctctctgtatggtctcacttaatgcaaaatggtttcaagtgcggtctatttcacatggaccatctggtttgaatccacgcactaaaaaaggataaatagcaaatcatctcccatcctcctcagaacatcaaagtcatcttcatcttttcttctacccctagataatgtaaataccaaagcaaagttcttttgttcttcttccccaggaatgttcaggccaggaggcctcattataagtctggaaaaaaagcaactgttacatgagaccttgaaaaatattatctttagaagtcaatcactcttgggttttttgtacattgtgagtacttgtttagttaacacttactggaaattaaaattaaacctgatagcataattgtgatatataaatcacaaacactttggaattctctggtatttgtatttgggatgagttttttgcagccttgtttatttaccatgtagtaaacaagaaatgcttcttaaattttttttaacctaaacatgtgaaaaatggtccacggatgcatttggcaaccaagaggttattgtgttgtttgaccctcagaaagagatgtttgtcactcttggtatctttcccttgaggaatcatctcttgcaatcaagaagagactcagctcttgaaaagggccagggagaaatcagatagcatctcattccatgccgtaagaacaaggactcattcaattgctcaacagcttgctcaaaacatttaagttgccatcttagtttatccaggagaaaggatacccagacaagccaccatcctttctttctacttgtgtttcaagcatgttctacaatccctataatgtggcgggttaagccaggaatgcatcctttacttcctggtcagacataatgagatttatccctcaaatattcatgtaagaagttctcctcttcctccagcctgaaagtaccttgcagaactttggaccataaggaaattgaagaatgtctctattatatcccggtattagttgatgtcttccaatacatctcaggagaaggtcgagcttttcctactgaaccgagtgacatttaaaagggggcatttggatggaacatggtagaaagtagcaaactgctttagggaagaggcagggttatcttggttttataggtcttgcaaatatttattcaaggtgctaaaaagtagcgtctctccttcttaaaattattggccaaagtggtcttatgccattagtttgtaagtaaatattgctgcaacattctaaacagatttattaggcctgtcaccagcagccaaatatttatgtaagctccgtgggttgaaaaggtagtttaaggagattgttttaaccacagctttgtaaatgtttaaggtaacatcctgtctctttgaaaccatcccacctagccatatcgtcatatttataataaaaggacaacatgttcaaagtgatgcattatttcctgctgtccaaagttaggcttctgtccttttatcacagctaaacagaaaaaaaaaatatttcagagagacccttttatgtaatacctgggtagaagccactgaaaatgttactagtgggagttgagagagaggaagaaaatataattcttgtggcagatgtaatcaagagggaatgatttaaaatggtgtgataaggccttacttagaacacacagatatgtttaatagctgtactcattttctataatcaatctattttgccttagatgtacctcaatagctactagtgaattttggtacccaagtccagtctggttgccagaataaactgtgtgttgggggtgtgtctgtggtatgtgggtgtgtatgcgtctacctcagtgaattctgggttttgctcagttctaatcagtctcacttgctagtggtcttgttggtctctatatccgactatgatatatcagtcaggaccctttcagttgcaagtaaaagcaaccaatttttttttttttttgaagcagactcttgctccgttgccaaggctggagtgcagtggcacaatctcagctcactgcaacctctgcctcccgagttcaagcgattctcctgcctcccaggtagctggcattacaggcttgcgccaccatgtttcgctaatttttgtgtttttttagtagagatggggtttcgcccgttgaccaggctggtcttgaactccggaccctaggtgatccgcctgcttcagcctcccaaagtgctaagattacagtcctgagccactgtgcctggccaaaagaaaccaaatttaaattaatttaaacaataagggccaggctttggcttatctaatggaaagagccaggagatacatcttcaagtacagttggcttcaggcactcaaaggtgttgccaaaatcctttgctctactttcctttactttggcttcactcccaggtggctttagcttctgtagtggccacgataagccccagaagctcctgacttttattctaccagcttatcacacaacagacagaggcttggtctagacggagagacatagttcttctcaataatttagttcttctcaataattgtgatgactttatgtggcttaacctagaaccaggggcagcatatggtggttggggtcagctgtgatttaaccccatcaattggaagaggggaacttgggattactcagcaaaaaactctgagtgaagtagcaaaagaaggatcttaatgaatggtgaaaatggattcatgccttctacagttatgcacagtcataggagaccaacgttcagattctaaagatgacgctcagatacatgtgttgaaagaagaccaagagaccagaagccaaatgcaaagctggtgtaagtgacacagccagtacctcatttaatgcaaaattgaaaaggatgggggagataagcagttactcagttgtgtagaagtttacaaaatacccatctctaagaatttcactggatcttcccaaatttgttagcatcttggtattaattaacttaatggcataattgacgactagtaagtttatccaaaatgtgggccctgttttagctgaagtgcttgtgaaaacgcagataactgggccctggacctctttgtcatgctacctggaaatagagtatctgtatttgaatattctccctaggagattttttttataaactggcatcttgataaaatttaataattttggactatgggatatatgtttccatttcattccaattggcatttgctccacacttggtggatgctgaatgcataagagacaatggtcccatgttataactagaatatagataagtatctttaataatagggttagtgtggtgcattgaattattagcctcagctttgcacctctagagccacatccttgcctttgaccttattttggcagagagcactaccctgcctcttgactttgcattcagtcatgtgatttgctttggccaatggaatgtcgacagatgtagcagtatacaatctgagcatagacccaagagatcttccatatattcatgtgccctgtttctcttcccccaaatccctgagaggagcttgccctaaacagtggctgcatttcgttctgggtccaaagtgaacatatttggaacaattccccacataagttcaactggacccatagtttgaagcagagcctccccaagaagccaaacctggttcaaccaaccccaatgtcactgacagattcatgagaagaagcagttgttttaactcactaggcttgagggtagtttgttgcacaaggtcattgtagtaacagcagctaaccagtacagtgaggggttggaaatatctttgggggattgctttggtttgcttgggggttgatgccttgtcttggaggttaatgtttggtttgtttggggtttgtattgaggaggcaatttgtagagtaagcagttgcaacttcgttagaagggatctttctgggtccctggtatgtggccctagctctgtgggaatccagaggagatgaagaggaaactggtgtttattgtcagtattatcaacagcagcaacaaatattgggtgcgcctaccatgtgccaagtactaggtggggattacgagaggaataaggaaagacccaagctctagaaaaacgtacagtctctttgcaggaccattcctgggtttcattagaaatatctgaatatattgtctcagactggccaggtttcttgtagggcttgctagttgagaaattagatccttaaaggaaaaatattctcactgattctacccaccattctcatctttacacccaacaaaacctcactaagaggtttctgaggagccagaagttggatggattaacttggagttagtgaactgcagaaatctcttcccactggtggttcctgtgggtttcagaatagcaaagctgaaagttcacttgatgtattaagcacaatcaaaaatccattacctccctgaggccactactcctcctttttggttgagactgctacccaggaccagctacataatttgtgaggctcagtgcgaaatgaaattcagggcccattcaaaaattactcagaatttcaagacagcaagcacagaacattaaaccaggcgtggacccctctgagcttggggcccattgtgactgcacaagtctcaagccaggaagctggctctgctgccacctgcaggtagtgcaaatagctgatgtctacacatatgtaaaaggaagcaccagcaaagtttccagtcctgagtggatttgagaagatggccctgcagacattcattcaaaaagctctcatggtgctgacccattccagacctgccctgccccctgctcagcccactccagttgctgaaggacaagggtggacaccagttaccaggaaccattctgcaattccagcagccctctggctggactttttctccaatcattcagaaaacatttgtctgtgagcccctcgaagtgcttcagatgcaatccagacttgcccatggacttgagcagttacagctgtattgtacaggttgcataaaggaactgcaggagactttctattgccatgagggcgactgcccagggcccagggctcagggctcaggacagcatagaaacactagtgccagattccaccatggtgagagaattgcctcgatgctgcagaaactccagggcctcccagatgcactatcactcttatcacgtgcagacatttggcagacaggccttcctttgaagtcccagcaaaatgatggcgagttctcctgctaaggaacatgtggctggcaacaggaggaagagtaaagtggcggtcccttcctttccacaaaagtttaggagttggcatttctttttccacagtgttagagcttctgctattgatgcaaagggctaaaagctgacctgctcctttgtcatcttggaaaacctcaggacaatgcttaagaccaaggtgaaattacctattttgtgtgctcctgattttccttaaagaaataaaaaagggaacgatttggctaaggatggacatggtctaaatcaggggttctcaaagtgtggttctcagattgtaacctcttaaaaatatagattctttcacttgaacccggaaaacagaggttgtagtgagctgggatcgagccagggcactccagcctgggcaacagagcaagactccatctcaaaatagatagatagatgatagatagatagatgatagatagatagatagatagatagatagatagatagatacacagattctagactctgctcagatctactgaaggagataccatgagggcaggacccagcaatccatgtttaacaatccttctaggtgattctgatacaccattggcctaaatagcagatcctcattgcctgtatattagtttgctatggctgtcttaacagagtactgcagactggtggcttaaacaacagaaatttactttctcacagttctggaggctggaaacccaaatcaagatgctggcagggttggtttctagcgaggtttccctccttggcttgcagacagccgccttctcactgtgtcttcatgtggctttttctctgtgtgcaaggactcctggagtctcttcctcttcttacatagacaccagtcttgttggattaagatcccactctaacgacctcatgtaagcttaattacctccttaacaatcctgtctccgaatatagttaccctgggggttagagcttcaacatatacatttggtggggaacacaatttggtctataatagcctgacaccatcagaccaccagttttcaacattaagccttccaaggactataacagtaataacgcacattaagttggcatttctacttgccggatctgtgctaagtgcttttacatgcatgattacctgtattattatccctactttgccattgggaaacaagctcagcatgttatctgccaaacctcacagctgatggcaaaaccaggctctaaacacaggaggtctgatgccaaactcaaagttcttaatcactactgaggtagtagccgcaagccccggctaccactcttggtttttgttgttgttgttatcagcatatacgtagtttttattcttttatgtagcggcataccattacattttatgaatgtgacataatacaaataggcgttgtccctctattgttggaaatttagattgtttctaggttttacttttctattgtgtatatttaaggtgtacaacatgatgttttgatatactacatagtaaaatggttatcatagttaagcaaattagcatatcctcatctcatatagttacttactttttctcgtgctaagaagcacctaaaatttactctgttagcaaattttcagtatacacttcaatattattaactacagtcctcatgctttgcattagatctctagactttttcatcctacctaacttcaactttgtacctcatgtcctcccctttactcctggtaaccaccaatctactctttgttaccatgtgtccaactctttttttaaagattccacatatgaatgagatcatacagtatttgtctttctgtgtctggcttatttcacttaccgtaatgtcgtccaggttcatccatgtcacaaatggcaggatctcctctttcaagcctttttcaagactgaataatgtgtgtgtgtgtgtgtgtgtgtgtgtgtgtattacaatttatttgtgtattcacctgttgatggacacttccattatttttatgtcatagccattgggaataatgctgcagtgaatgtgggagtgcagatgtctctattaggtgctgatttcatttgggtttcaactcagaagagggattgctgtgtcatatggtagtcctagctttaattgtttttaggaacttccgtgttgttttgcataatggttctatcaatttacattcccaccaacagtgtacaagggttcccttttcttcacatctttaacaacatttgatatctcttgccttttttatgatagccatcctaataggcatggaatgacatctctttgtggttctgatttgtatttccctgatgattagtgatgctgagcaccttttcatatacttgttggccatttttatgtgttctttggggacatgtctattcaggtcctttgcgcattttttaattaggtcttttttttttttttttttttgctattgaggtgcacgggctccttatatattttggatattaacccctgaacagatagatacatgatttataaatattttttcccaattcataggttgctttttaatgtggttgtttcatatgctgtaagaaacttttagtttgatgtagccccacttgtttatttttgcttttgttgtctgagtttttggtatgatgttcaaaaaaccattgctgaagccaatgtcaaggagcttttcctttatgttttcttctaggacttttatgatatcaggtcttacatttacatcttcaatccattttgagccgacttttgagtatgctataagacaaggatctaatttcatttcattcttttgcatatgaagatccagttttcccagcaccatttattgaagagactatcctgtcccaaggggtcttcttgatgcccttgtcaaaaattagttgaccatatttgcctgaatttattctgagctccctattctgttcctagcacccttgttttttcgaccaactacatatgggcttccatggtactgcatctctttggcttttttttaaagatgaaatagagatgggaattgaaaaaaatggagtagagtagagagagaaatgcaagattatattcatagatattcattgagtgtttactagatatagtccatggcctctacttccaaacctctagaagcttctgctggagggagttctgttctaatcatcatcaggaagattttggaaatcaaagaagttattctgagatagtttcatagtatcagaacagcccttctattccatgaaagacagagggcttgagtgtcactaatcactgaattccccatgccgggcacagggcctgattcatgttggctctcagtaaatatgtaagaaaggagttcatgaatcaggatacatgccctttggtgtttcctgggtagatagagccttctttcttatggtttagagcaggcatccccaacccccgggtcacagaccagtaccagtccatgccctgttaggaacctggccacacagcaagagatgagtggcaggcaagcaagtgttattgcctgagctctgcctcctgttggatcagcagtggcattagattctcaaagaagcaagaaccctactgtgaactgcacacgttcacgatctgggttgcgtgctccttatgagaagctaatgcctgatgatctgaggtggaacagtttcatcccaaaacaattttcctccactctggtttgtggaaaaatgtcttccatgaaattggtccctggtgccaaaaaggttggggactcctggtttagaacaaccatatataccttgttgttcgaccctaaagttaagaaaaccttaatccatttgccacccgtttaagatgtcagagaaaattttgctaagattacattagctacttattgttttggaaaacttggagaaattggagaaaataaaacaaattaaggttggcaagcttaatctattagcttccaaatcaagtctttgtttaaacaggacataatcacaagatagccacattcattttaaccacaccctgagtaaagataaattacttttagctcttctaccatctggaacataacgggaaaaggcaacacaagtgaattttcaaaagcaatgatttttttagctgtagagaaactagttgcagagaaattagagtagtacatattctgcaaaacagtcaaattttggtaaagttttaagacagacataaagaatgctgagtcaagcggcttcctaggtttaagaattcaaccttgcagattggcagagaccatggcttgtgtctcagctccagcaaatccaccaaagggatgtgctgaaggggcaagaactaggtttcctccaaaacaggttcctacctccctcccactggggacccctgaaacaatgcttctgggtctttatgggacatgtttgggctggagtgtgatcataggatcagtatcagcttaacatgtactactcacttacagcatttcagcaacatgctgagctcttggcatctttgtcttaccaagtccaccagaaccacaacacagtgtgactcagttgaaaatagggcgtaactgagatataaacccttctcttgctttgcaatgacagctaacatttattgagaatttcccgtgtgccaggccctgttctgaacacatcacaggtcactatcctaactgaacagtggaggacacgggaatatgtgttggttaatgtgtcttatttgttccaggttatgcaattagtaatagatggtaccaaaattcatacttgggcagtctggctctagagcctggggtattagcctctgcacctcttctcaccaatctgaaatggaacttggctacatagagaaatatgcccagtgtcctcctcaccttaaccaacaacagaatctgggatctgaaaggagccacagaagttcccttggttttgcccttggccacaacccagagaaggtgttattatccatagtgaaatagccaaggttcttgggttaaaaaaaaattggcccaagtttatttaaccaagaaatggtgactgaatcaacaagcatgtattatgtgtgtgttcagcttggtgagtctggcaggctgtaagtcagaagaagccccatggcttaagggggcctcctcactgggctctgtgtgtaccaccccaggctgaggccgcagttctgtaggagcctggctctgtcgcgcaggactcccaggaccttgcacacagcttgtttgctggtggttatgctaaagcactagcctgggccattgggaagctgggaggcttccctgtacacaggcccagcccctatctgtgagctgagcacaggactactgctaacatcctcgctgacaacctgcttctagaaagtacattagggaaatggccctatgggcctggctgggttaggaggacccctacagataggagccaggttagaaatgaccagggaaccaatgggtcagccctcaacaggacttggtgggaaggatgtcagagccaagtcttgcttttgtttggcatgaagtgaaaaggctaaaggagactccattgtggggtactgaaagtgatccactagggaaactgactaggttccctggaatttggggaaactggtgttcccacctgaaatgttgaaaggcatgtgtggcatggattagcagtttgcctgagaaaggcgggtgcttgcaaagtttgggatgggcaggtcaaccacgcatttatgtttcccaggccaaatgtggactctaaggaaggaagctggtggtggatcatctctagagggatcttgcacaagaaggcctcctggaagagtgaggtgaccccaacagagaatcaacaagaagccagagactggggctttgccgggggcaattgcagccaggcgaaggaggcattgcctcaaaggaatcttaggtgggaaatcctcagtgctggggggcttccaaggaacccagaaggagaatgagctttcaggcatgcagcatagagaagcccctaatgctaaactgtgatgacacatttgcccttttcctctaattccttcaaattcctcactccccacaccccatccggccccgtaggagaaaacagtacctagaagtggacaaaatatggagaggaagggagaagaaaatgaccatgtcctcctccactgcaggcccctttgctggagaaggattggattctcattgaaggagagttcagagttttaacactggatagaagtggacctttttatatctgaaagtgactaaaaaatctgcctcaggttttacccaatggaaagtgaaaacaattcaggtcttcagagtgactgatggataatcatgagaaggaaaagatgctctccagttagaatttttttttttttttttgagaagaggccttgctctgtcactcaggctggagtgcagtggcatgacgtcagctcactgcagcctccacctcccagtttcaaatgattctcctgcctcagcctcccgagtagctgggattataggcatctgccaccacacccagctaatttttgtatttttagtagagacagggtttcaccatgttggccaggctggtctcgaactcctgacctgaggtgatctgctggccttggccttccaaagtgctggaattacagatgtgagccactgcacccagactccagttagaatttttgatgttgaattcattccattgcacatatacatataacacacacacacacacacacacacacacaacacccctctttttccacaagaacaaggaagttcaaaaaggcaggttggtgctacatggttcaaaaatgatgtcatattataatagctgtaggagaaaggcaggtctacccagaatgaagcaaatactaagattacttcttgggttctctggagaaagatcatggccatatgtcaagaatctgtcattaaagagtcaacacatgacaagtacacagaagatggggggatgatacttgggaatagaaacccaggctgaaaactcagtgtgatcaatgtggggccaagtgtccattttgtaatagatgatcaattatgtcatgatctttagtggacattttgtgggttctcatggtgtccttagaaccatcagaacatacaagtagtgtttcaaataataagcgtttccatcacctgagtggaatttcttacactctcataaaatatgatcaggttgccttctcttaaaagattattctccacagaatagatattttttgtagtcacagggcccaaattttctaacagagcctgttttctaacagaatctctattttgagactgtagaaagatgtgtgtaatggagcagaatcaatgtcatcatctatgacctagctgattagtattggatggtaggttgcctttcactgtgcttggggatgccttagagaactttttgtagccagctcttaaaatgctttgtacgttttaggattaaacatttttagattgcacacacagtcctaaaacaaaggaaaacctattgcttaaacaatgtctgaagtttagtataatactagaccttatgtattaagtacaaactaagaaatgtcaaatacagaacctcaaataagatgaaattttatttctttcttatgtgaaagtccagactgaagcaggtagtcttgggtgggcagatggttctgatccaccagctcatccaggcacccaggcttgggatctctaccctcctcaatgtgtggcttccctttctgggtgtaaaaatgctgccccaaatgccactgccaccagttcccagtggttaggagatgacccagatgttgcatgcatcactccctttcacattctattggcccaaatgtgatcacaaggccacacgaagctgcaaataagactgtgcgatatggtctgtcaccgggcacccatggacccagctgaaacacatgacttctgttactaaatgaaaaatgaggccaggtgtggtggctcatacctataatctcagtactgtgggaggctgagaagggcagatcacttgaggtcaggagtttgagacaagcctggccaacatggtgaaacctgtctctactaaaaatacaaaaattagccagtcatggtcgtgggcacctgtaatcccagctactcaggaggctgaggaaggagaatagcttgaacctgagaggtggaagttgcagagagccgagatcgcagactgcactccagcctgggtgaaagagcaagactctgtctcaaaaaaaaaaaaaaaaaaaaaaaaggaaaatgagagaatggatacagggagtagtggggggtaacagaagtcacttttatttctcagtaattattggaaagaaattgactgtgtaatttcttttaacaagaatttttcctgctggttaggggcatagcaaaaaaataaaaattaaaaagaaaccaagaacgtattgaatgcttcttgagtgctagtatcctagttttcccctggagagatcctcctgaaaaagaggactttattagtaggatacctttaaaaggaaaattctaatgtattttaaaataagctaacttcacaggactgtccctaacatattcatttctttgctggaaatcatagcagagaaaaaccctttctcttttcacctggcatcaattaaatgtaaatgtcttgaacgctcacagatgatatggcataggatgagctcatggtgatgtataagctggcgtaatactcactaggtgctagaaaccgagccattttggtctggcaggaaaaatatgccaggactgcaagtgattgtcacgaggccctttgctgtttgtcattctctcctcattttcatactgcacatttagtcctacccaaaataaatactttacagttgtcctttagaagcagagggagctctgggctgggaggcagaagccccagggttgataataagctcggctgcaaatagttggtatgaccctgaagaaataacaaacagggcctgggtttctgttcactaattcatcctgcgaacatgtatttgtcacttgctgtgcagattctgtactaagtctatggaggtatccttcatctctccccttcttggactctttatgatgctctatgtatcccagtctccatgggccatagaaatgtggctacaatctcatcacatacacaaaccaaacaaacatccgcagcattgctgtttgcagcagagattgctgattctctcccactacgcattctcctgttcctctattgtaatagaagccctgatcttctgttgggcacaaggcaaactcttcaatcctacttgttagctacaggtgtgcatgcatcaagttctggccaataagatgtgagtggaagcaatatgtgcaacttccacgttatgttctgaaaaacaagagatgtgccctcccattccttttcctccttcctgctggctgggaggcaggcatgggccagggtcatcttggaccaagtagaagagggcaatatccaagggtggcaatgaaacaagatggaagaaaccttataccctgtattagtattctatttctctgtaataatctatcctaaaatgtagcaacttataaaaacatttatgatctcacagtttcttttagtctggaatctgagcacggctctactgggtgccctggctcagggtttctcaccaggatgcaatcaagccattggccagggctgctgtaggtcaatgctcaagttggggaggatccacttccaaggtcattggtgtgactgctgggagccctcgaaccccagctggacattgatgtcttatcacttctgccacataaagttggttagaaggtcccacccacatgtgaggtgattatgcaaggccatgaacaccaggaagagaggtctgggaagccactgcagaggctgtgcactgtacatgctccctcccatagctggtctgcttatgccacaactgttaaaggaaagtgaaataaacaaccgtcttctttaaagtagggtctgcattagagcagccaacgttgtgttctaattgatgcagtgccagatttgtttaattctgtgaaacatttgtccagttattgaggcccttgtaataggcattttctggaatatctgccaagcgaaatcactttctctgaaaactgcctcccttcctcctcctatacctcacctcccctatctgaggacttctgtggcatttttgtaatttaacaaaactgcttgtcgccatctaatgaaagaaagggtaaaatgctgacttcaggtgggccaaatctgtcactcaggaatctggaattgggatccagaaaccctggtcagtgtctctcgtgagaactggacatcgtgtgacattaggacggggtctgcatgtgcgtgggaaagcgagcaagccagtatgcagagagaaggaagagacagaggtgccgagaagccttcagagtgggcttgcttcacagcatcccattccaggccctgctgaagcccagctctggcccaggtatggagatgcctctgcccaactccacacatatgtcctcatcgcccccttgttttcatttaaacccgtctaagtgggctttgggtgtttgaaattaatctctaagaaaggcctttagtgttttgagttttcaacacctaacctcaacatcatctcacccagctcctagcatcctgtgagctctcctacatctcctcccctgaaaaaaaaaagtcacaaaatcttgctggaaaacacgtggggcaggatcaacagggcctactgaaaagaaacgtgcaagggtggacgcagcatggatagatatctgtgatctgacatcagtttgttggaggtcaggaggaggagatgctttggtgccattaggtgacaaagattcaaaaatgtcatcccctcttgcctcaatcccctgtgcactcacatgctacttgtatggccccaaaacaaggaactccacagccttgttactgagctgttagaaacagcccccaactctgtgagttgacccctaccccttccctggagtggctttgcttttgggttttctaatgtcactccaagagacagagtctctgctcagagatagcatctttctccacgcatgccctccacgtgctactctccatctggattgtttacttcggaatccaggccagggtgctggggatggttgtatttcttgagtggaattctgcactccccgtctggagtcacactctgcattctttcgatgcctcctctgagctggaaggtcattttgcagcaaagctattggctgcacaagctcatggaggcctcacaccagaccttgtcccagcagccgaccctctggtatggagggaggtggagtgggatgtggtaaacaggaagacagcaaaccccgacttggactggggagcaggaaacatcagccaccacgctcagccctgtgccccgatcacaacctcctggggttgcagtgcctcccgggctggtggaaggattgttctcagcagcttgggattgtcaatgcagcaggaagaattttatcctaagatgccacctcaaaaatgtcatggcttctgagtctggtgtgacagatggatagacagatggaggaaaataggacaagggagagtcagagggagagagcagttgagtgctgggcctgtacccccaactcatattctaaactgctgcctgtccccaccttatctccaatctctccccacccagctgcattttgctatttctacaacttctaacatactatacttacttttattatcagactctccatactaggatgtaagctctttgagggcagggaatcttcgttcactgataaggagcctaacagtacctggtacatgcagccattcaacaaatatttgttgaataagtggaaggatggatggatggatggatggatggatggatggatggatggatttccctagggatgcttttagcaatttccctaccatatttcttttactattttcctgctgtttttcaaactgggaatgccctcgcccaaccccacaaatcagcctgttcatctctcaaatgccagctccaatgccactcctgcagtatggccttgtggttaagagccaccactgcagggttcaaatccccactcctctgcttgttcactgtgtaggcttcagtttacatacctaatgggattatcacaaagacaaaataacatcatgtccaaaccatgtttaattaacacatgccccctaatgttcccagttaggtaccatctctccctcctttgagcatgcatgttacattgagtctctcttaggaactcttcacattttcttttgtatcctagctattcttgtacatgtagtattttccttgacagaaggctccttctgatacagtgcttttttaaatacatattcttaaacaccctccttgagtatttttatctgcagcattttaacaaagaaacatcaaagcacaggagtgaatgtgctgggaagaaggagtaggggagagattactattctgaggatgaatgaggcattgggagggcttggaggatgggatgcagaaacacgcaatcaaaaaaacagtcacccaatacagcatttcatgtcatgagctgcaacttcatagaagttttcagagcccatgcataggaatcatccgtctcctatgaatcagaagcccccagttcaaaggaagctggtgaagaagcaagagtcagccccagaaccgaggcagcaaagagttggcttctgaagaaaaggacctgcccctttctgttgcgggaatctcctacaaagtcattcgtgataaacactggtgtgtttctgcaatctggcttttatcccttcaaaggttcctgaatgggagcaattaccagagatggggaagccaagaaaacacactgtgagtataaacagcttgacaggacatttatacagagaattcagaacagagtcctcattcccaagcgtggtacaggccagaggggagatttttagagcaagagacacccatcttttgtcttctttctaggaagtgttcttctgtcaggtatgaagagtcttggttgagtttcagcaaaaggattgggtgactaattgggatcacagggtagcagtgcaccgaggaacctaaccactgtcctcactcaggaccactgaagctcttttataggaaacagaaaggaagaagtcataactgttttccccaacttcattgagatgtaattgaaaaaccccagcccctggtagccaccattctactctctacttctatgaatttgactattatttaaatttcacctatgagtgagattatgcaatatctgttttactgcatctggtttatttcacttagcataaggtcctccaggttcttccatgttgttacaaatgacaggattttcttctttttaaaggttaagtgatattccattatgcacacacacacacacacacacacacacacacacacactccacatcacattttctttattgagaggacagattaatcatccaggaaatgtaaaccaaaatcacaatgagggttgggggtagtggctcacacctgtcatcccggcactttgggaggctgagacaggggcattacttgaggccaggatttcgagaccagcctggccaatatggtgaaaccctacctctactaaaaataaaaaatatatacaaaaattagccagtcatggtggcacacacctgtagtcccagctactcgggtggctgaagcacaagaattgctcgaatctggaagacagaggcttcagtgagcctagatcacgccactgccctccagcctgggtgacagagcaagactccatctccaaaacacacacacacacacacacacacacacacagtgagatatcaccttacaactgttagaatgactatttctaacagaaagacaaaagataacaagtgttggcgaggatgtggagaaaggggaacccttgtacactgttgatgggaatgtacattgatatgacctaacctttgaaagctgaatgagccaacctgacttcactggatgatgcgtggtcaggattcaatgattatagatctaatcctcagttttctccttcctgtgtgccaggcaggcaggatcttctgtcctagaaaaggtttataaaggtctcagggttcatacgtaagagtttatgcctcagaggcaggctgacttgagatagaaccacggatctgctgtctactgttagacctggcaagcacccggccttgttaaggcttactttctctttctctgaaatgggaataaagttagtatgcacctcgctgggattatctttaggaataataaagaaataagcagaattccaggctgccaaatgccctccgtgaagtttagctcttatgattattattaaaacatgaaatctacattctgcggaggaagaggaaggggctgtcatgtcagagaagggagaggaattggttcttagaatccaagtagaatgagtctcttgaagccacatatctagctttgctttttgaaaagaatattagaacttttcaggggtgatagatctgttcactatatggactgtagtaattgtttcagagttgtatacatatgtcaaaacttatcaaatttgtactattttattttattttttggagacaaagtctctctatgttgcccaggctggagtacaatggcacgatcacagctcactacaggcttgacctcccagacccaaacaatcctcctacctcagcctccccagtagctgggcccataggtgtacactagcatggctggctaatttttaaaattttcatagagacagggtttccctttgttacccaggctggtcttgaactcctgggctcaaactatcctcccatcttggcctcccaaggtgcctggattacatgtgtgagccaccatgctgggccaaaacttgttaaattatagactttaaatgtgtgcaatttattgtattttggttacacttaaataaagctgtttaaaaattatcttttagaacagcaaggaaatggagaccataatgataatgattttcaggcaggtgattacaagggtctgagcacatgaataaatgaacactcacatatgaagaaatactgatcacacatgaccattccttacaattttcttaatatccctcctttctctcccccttcatctacccagagtcttccacatgtaagccccagatcaagtcccacctcctctcaaaagccttcactgacaccttattgcaattgtacctgtctatgtcttaacacatatacattgtaatttctcaaataatgcctccagacttctgatgagctcttgttctattatttagattgtttaacttgtcatatgtttgtggtgatgttaagttttgaaaaaaaataggagactcttcttttgtgattgagcacataggacttgataaatacgttcccattgaaagacaaaatttagagttctatgtcctagacttgactctcatcaccacaaacttcaagggatgatccccaacattctattggatagaaactttgatggtatcaaagactccttgacacgagcaggccatcggctgaggcttgactgtttatcacttgtttaaatatgaagattttgttttaattgtatttgttgttcataatggcttttcatccacaactgtacaactaaagggtctgacttgagaaacccaaaagcctattttgaaagcagcagagtttaaaactcttcttccagttccttccacatttgaacaggatagttctaagtcccagccaagcttgggccctggaacacagggtgcctgggaaaagctacccaacaccatcgaggtggccaccctgatcttattccattatcctaagccctttcgtttttgtttgtttgtttttagctcccctggaagtctaatggagtcagatatcacatctcctagaaaaggaatgacatttataacccccttctgctcctgcaaatggaggggttatcttgggattttgcccatcagcggctctccagaatctcaggcggcttcttagcctggtgcactcggagtcagctccaagcctggaggtttagcatccaggtagcctcagacctgatcataaggcccacagttgagagttagcaggacagccctaagtatcctcttcctgtttcagagggttgctggcaagtttctgaaaacctgcagcttttttatgtctttaatgctgggctctttgccatcattcatttcaggactagaggtagccctgtttaatattaggctgctccgcccacccccgccaccacccgaataagaaaggatgggctccatcatgtttagtgcctgccaagacagtggtgtcactggggatggtcacagggatgcaccctggggaaggagccagcaaggttttgcttttctggtgtcagagggaagacaaagagcagctttttgggtaggaactgaaaaaaaaaacaggaatatttagaatatttaggagggcatgctctttttccaaaatggtctttgtggctttgtttttctattattaaataattattcttgctgaatgaattgtttacattagcatttcttaaactgggttccattgtgtcagtaggtattccttcaaaaaaagatgtaggcagagaattccattatcaaaacagttcagaaaataaaggtctggagagcaagggctctaaggaccagctatagggattggtgaaagcttacagtggtcataaggaaggtggcattggagccaggcctgattcagaccaggcagggagaaggttgcaggtaaaaggacctatagataggaaaatgaaaatgcttagggagagatgagacacctctggcttggagagtttagtgcagcctaatttttatttatgtaattccaagaaaatgccctctcttctcattgctttccggggagacacagccagcagcctccttggggcagacactgtcatttgcctctccaaagctcatacttgcacgtgcacacacacacttcttcgctgcaagtagagcctcagtgtttgtctagatgtccctccctcaggtggcggggggcagaaaaaaccctccctctgctccaaaaaggtgatattggttagtctaagccaattatattaattcctctatccttgccatggattgatttgggcatggttatgtaacccagccctaacaaatggaacctgagggataatcttaggaattctggaagagtttttcttcataataagtaaagacagacacctgggaggaaatgcagttttctttgttaggtgtggaatttctgcatgaaattctagaaactactacaaccatccagcaatttggcgatggatggtgggagaaagggcagacattctgagcatggcagaacagaaggatgtaaaacacctgggcctttgatgacatagtcatgcagtctaattaaccgtggaatcactctctctctggacttgctgttaagtgagagtataaactccattcagcttaggccacttttcattgagccttgggctccttgcaactagatatttcatgagcagagtttctcccttgatagaacacatctaacaacttaaccatcgtgctgcccacccattccttgggtagactcttcaattagcccctttggatcgtagagtttggcctttcaggctgcctctggccaatgccttcctctgcttttcccttgtcctctccattgtccatgtcctggttcccagataaacttacagaagatcccatacttctcaactgtaaaaacaggaaaagtatctcatctcatgggtatatctaaagaattaaatgagatcctgatgaaaagaggttaagagtgtctggcatgcagtaagtggtctacaaattatagttttaacaatgataacgataataatttttaattaaaattaataattactttggattgactaagcttacctaattcagatatggtcattcaaatttcagtggggtattgttgttgttaccaaatctagtatagcagcaagaaaaagcaataatatgtaacattggtacattgccttataattggatctttttttttgcgattggttaaatgcattttattttatccataatttctattccatatttttctttttatttattttattattctttttattttattttattattattatactttaaattttagggtatatgtgcaaaatgtgcaggttagttacatatgtatacatgtgccatactggtgtgctgcacccattaacttgtcatttagcattaggtatatctcctaatgctatcccgccccactccccccaccccacaatagtccccagagtgtgatgttccccttcctgtgtcgatgtgttctcattgttcaattcccacctatgagtgagaacatgcggggtttggttttttgtccttgcaatagtttactgagaatgatgatttccagtttcatccatgtccctacaaaggacatgaactcatcattttttatggctgcatagtattccatggtgtatatgtgccacattttcttaatccagtctatcattggtggacatttgggttggttccaagtctttgctattgtgaatagtgctgcaataaacatacatgtgcatgtgtctttatagcagcatgatttataatcctttgggtatatacccagtaatgggatggctgggtcaaatggtatttccagttctagatccctgaggaatcgccacactgacttccacaatggttgaactagtttacagtcccaccaacagtgtaaaaatgatcctatttctccacatcctctccagcacctgttgtttcctgactttttaatggtcgccattctaactggtgtgagatggtatctccctgtggttttgatttgcatttctctgatggccagtgatggtgagcattttttcatgtggttttttggctgcataaatgtcttcttttgagaagtgtctgttcatatcttttgcccactttttgatggggttgtttggttttttcttgtaaatttgtttgagttcattgtagattctggatattagccttttgtcagatgagtaggtggcaaaaattttctcccattttgtaggttgcctgttcactctgatggtagtttctcttgctgtgcagaagatctttagtttaatgagatcccatttgtcaattttggctttggtttccattgcttttggtgttttagacatgaagtccttgcccatgcctatgtcctgaatggtaacacctaggttttcttctagggtttttatggttttaggtctaacatgtaagtctttaatccatcttgaattaatttttgtataaggtgtaaggaagggatccagtttcagctttgtacatatggctagccagttttcccagcaccatttattaaataagaaatcctttccccattgcttgtttttctcaggtttgtcaaagatcagatagttgtagatatgcagcattatttctgaggtctctgttctgttccattgatctatatctctgttttggtaccagtaccatgctgttttggttactgtagccttctagtatagttggaagtcaggtagtgtgatgcctccagctttgttcttttggcttaggattgacttggtgatgcaggctctttattggttccatatgaactttaaagtagttttttccaattctgtgaagaaagtcattggtagctttatggggatggcattgaatctataaattacctttggcagtatggccattttcccgatattgattcttcctacccatgagcatggtatgttcttccatttgtttgtatcctcttttatttcattgagcagtggtttgtagttctccttgaagaggtccttcacgtcccttgtaagttggattcctaggtattttattatctttgaagcaattgtgaatgggagttcactcatgatttggctctctgtttgtctgttgttggtgtataagaatgcttgtgatttttgtacattgattttgtatcctgagactttgctgaagtttcttatcagcttaaggagattttgggctgagacgatggggttttctggatatacaatcatgtcatctgcaaacagggacaatttgacttcctcttttcctaattgaataccctttatttccttctcctgcctaattgccctggccagaacttccaacactatgttgaataggagtggtgagagagcacatccctgtcttgtgccagttttcaaagggaatgcttccagtttttgcccattcagtatgatattggctgtgggtttgtcatagatagctcttattattttgagatatgtcccatcaatacctaatttattgagagtttttagcatgaagggttgttgaattttgtcaaaggccatttctgcatctattgagataatcatgtggtttttgtctttggttctgtttatatgctggattacatttattgatttgcatatattgaaccagccttgcatcccagggatgaagccaagttgatcatgatggataagctttttgatgtgctgctggatttggtttgccagtattttattgagcatttttgcatcaatattcatcaaggatattggtctaaaattctgttttttggttgtgcctctgcccagctttggtatcaggatgatgctggcctcataaaatgagtcagggaggattccctctttttctattgattggaatagtttcagaaggaatggtaccagttcctccttgtacctctggtagaattcagctgtaaatccatctggtcctggactctttttggttggtaagctattgattattgccacaatttcagagcctgttattggtctactcagagattcaactgcttcctggtttagtcttgggaggttgtatgtgtcgaggaatttgtccatttcttctagattttctagtttatttgcgtagaggtgtttgtagtattctctgatggtagtttgtatttctgtgggatcggtggtgatattctctttatcattttttattgcgtctatttgattcttctctgttttcttcattagtcttgctagcagtctatcaattttattgatgctttcaaaaaatcagctcctggattcattaatttttgaagggttttttgtgtctctatttccttcagttctgctctgattttagttattccttgccttctgctagcttttgaatgtgtttgctcttgcttttctagttattttcattgtgatgttagggtgtcaattttggatatttcctgctttctcttgtgggcatttagtgctataaatttccctctacacactgctttgaatgtgtcccagagattctggtattttgtgtctttgttcttgttggtttcaaagaacatctttatttctgccttcatttcgttatgtacccagtagtcattcaggagcaggttgttcagtttccatgtagctgtgtggttttgagtgagtttctttatcctgagttctagtttgattgcattgtggtctgagagacagtttgttataatttctgttattttacatttgctgaggagtgctttacttccaactatgtagtcaattttggaataggttggtgtggtgctgaaaaaaatgtatattctgttgatttggggtggagagttctgtagatgtctattaggtctgcttggtgcagagctgagttcaattcctgggtatccttgttaacgttcggtctcattgacctgtctaatgttgacagtggggtgttaaagtctccaattattattgtgtgggagtctaagtctctttgtaggtcactcaggacttgctttatgaatctgggtgctcctgtattgggtgcatatatatttaggatagttagctcttcttgttgaattgatccctttaccattatgtaatggccttctttgtctcttttgatctttgttggtttaaagtctgttttatcagagactaggattgcaacccctgtctttttttgttttccatttgcttggtagatcttcttccatccctttattttgagcctatttgtgtctctgcacgtgagatgggtttcctgaatatagcacactgatgggtcttgactctttatccaatttgccagtctgtgtcttttaatttggagcatttagtccatttacatttaaagttaatattgttatgtgtgaatttgatcctgtcattatgatgttagctggttattttgctcattagttgatgcagtttctccctagcctcgatgttctttacaatttggcatgattttgcagtggctggtaccggttgttcctttccatgtttagtgcttccttcaggagctcttttagggcaggtctggtggtgacaaaatctctcagtatttgcttgtctgtaaagtattttatttctccttcacttatgaagcttattttggctggatatgaaattctgggttgaaaattctttccttcaagaatgtcggatattggcccccactctcttctggcttgtagagtttctgctgagagatctgctgttagtctgatgggcttctcttcgtcggtaacccgacttttctctctggctccccttaacattttttccttcatttcaaccttggtgaatctgacaattatgtgtcttggatctgctcttctcgaggagcatctttgtggtgttctctgtatttcctgaatctgaatgttggtctgtcttgctagattggggaagttttcctggataatatcctgcagagtgttttccaacttggttccattctccccgtcaccttcaggtacaccaatcagatgcagatttggtcttttcacatagtcccatatttcttggaggctttgctcatttctttttattcttttttctctaaacttcccttctcgcttcatttcattcatttcatcttccatcactgataccctttcttccagttgatcccatcggctcctgaggcttctgcattcttcacgtagttctcaagccttggctttcagctccatcagctcctttaagcacttctctttattggttattctagttatacattcatctaaatttttttcaaagtttttaacttctttgcctttggtttgtatttcttcctgtagctcggagtagtttgatcgtctgaggccttcttctctcaactcatcaaagtcattctccgtccagctttgttccattgctggtgaggaactgcgttcctttggaggaggagaggcgctctgcattttagagtttccagtttttctgatctgtttttttctgcatctttgtggttgtatctacttttggtctttgatgatggtgatgtacatttgggtttttggtgtggatgtcctttctgtttgttagttttccgtctaacagacaggaccctcagctgcaggtctgttggagtttgctagaggtccactccagactctgtttgcctgggtatcagcagcggtggctgcagaacagcagattttcgtgaaccgcgaatgctgctgtctgatcgttcctctggaagttttgtctcagaggagtacccggctgtgtgagatgtcagtctgcccctactagggggtgcctcccagttaggctgcttgggggtcaggggtcagggacccacttgaggaggcagtctgcctgttctcagatctccagctgtgtgctgggagaaccgctgctctcttcaaagctgtcagagggggacatttaagtttgcagaggttactgctgtctttttgtttgtctgtgccctgcccccagaggtggagcctacagaggcaggcaggcctcctggagctgtggtgggctccacccagttggagcttcccagctgctttgtttacctaagcaagcctgggcaatggtaggcatccctcccccagtctcgctgccactttgcaatttgatctcagactgctgtgctagcaatcagcgagactccgtgggcgtaggaccctccaagccaggtgcgggatataatcccctggtgcgccgttttttaagccagtccgaaaagctcagtattagggtgggagtgacctgattttccaggtgccgtctgtcacccctttctttgactaggaaagggaactccctgaccccttgtgcttcccgagggaggcaatgcctcgccttgcttcggctcacacactttgcattgcacccactgtcctgcgcccactgtctggcactccctagtgagatgaacccagtacctcagatggaaatgcagaaatcacccgtcttctgcgtcgctcatgctgggagctgtagaccagagcttttcctattcggccatcttggctctctataattggatcctttactaagcgtatttacgtgtttaccttgtttactcccaaaattatatatatataatatatacatatatatatatatatttttttttttgagatggagtctgtcactgtcacctggactggagtgcagtggtgccatctaggcttactgtaacctctgcctcctggattcaagtgattctcctccctcagcctcctgagtagctgggattacaggcgcctgccaccacacctggctaatttttttgtatttttagtagagatggggtttgactatgttggccaggctggtctcaaactcctgacctcatgatccacctgcttcagcctcccaaaatgctgggattacaggtgtgagccactgtgccaggtcaagaatcttttaaatgtcagtatcatttccattttactgaagctactgaagttaaaagagcctaactaaatgcctcagctcacatacctggtgattgaaattcaaatcttaacagactccaaaatacatgttctttctatcacatcacctctctcaatcacatgcatacagctcactgcagttgactgctctcagcttctaaagttttgtggctggcctctgtgactaactagatttgttagtttctctccatttaataactttcacgttaatatcccttgaaaatgttcatggttctgagagtagtacagggcaggggagaagagaagaatggcaaacagaccagtgttctagcatcctctatgaaaggctgggtttgctgctgtaatttgtataagcagctcctgtttttggcaataagttgagtattcacactacttcttagcctttctttgtttatccagggggtgagactctgtgataaggagttgctaatgaggtttatgtgactgggagtggacatgtgctgtgaaaactgtttacctttcactgagtgtcaacagggtccactggatggctgccaagagatgctcattcagagaaacagagagagagacagagagacagagagagagagagaaagagagagagatttcctatttaggaaaaatgtgggtgagttagaaactagagaagaaaatcttttggaattcaatgccaaagaaacagatgagtttaacaactggcttaatggcttgggaatgtttatcaatgtcagttcttactggtattctagtatatgactgtctaaattgttctctcccaataaccacccatgcttttaggaaatattttgttctctttcttctttccagcatctaccacagtcaacccaaaacagcacctaaacatgaagagtttggtttctttgggtattctgttgcatttcatggtatctgaacaggggcttgagctaatcactggtcaggatctttagaatgagtgactaattctgaatgggaggttgaactgaattataaaaggtttctcaaacttttgaactttctttctcctgattaggcgctagtcttttccatggtcttcaggggatggagaaggaagagataaaggcaggaaatagctttgcttcccaccactacagttgtttctgatgctagagcttcaatcagatctttgacattgaagcatacctgacatggtttggatctgtgtccccacccaaatctcatgtcaaattgtaatccccaatgttggaggtggagcttggtgggagaagattggataatgggggcagtttgtcatggtttaacaccatccccttttgcattgtcatggtgagagtgagttatcatgatatctgctgtttaaaagtgtgtagcacctctcccaactctgtcttcctcctcttatggccatgtgaagacatgcctgcttccccttcaccttctgacatgattttgagtttcctgaggcctccttagccatgcttcctgtacaacctgcagaaccatgagccaattaaacctgttttctttatacattaccgagtctcaggtatttatttatagcagtgcaaaaacagactagtacagaaaactggtaccagaagtagggtattgatataaaggtacccgaaaatgtggaaacagctttggaactggataatggtgcaacagtttggagggctcagaagaagataggaagatgagggaaagtttgaaacttcctagagacttgttgaatggctgtgaccaaaatactgatagtgatatggacagtgaaatccaggctgaggaggtcacagatggaaatgatgaacttattgggaactggagtaaaagtcactcttgttatgtgtcagcaaagaaactggcagcattgtgcccctgctctagggatctgtggaactttgaacttgagagagacgatttagggtatctggcagaagaaatttctaaacatcaaagcattcaagatgttacctggctgcttctgaaagcctgtgctcatatgtgtgtgcaaataagtgacttgaaacttgaacttatctttaaaaggaaagcagagcacactagtttggaaaacttttagcctgggcatatggtagaaaaggaaaacccattttcagggttggaattcaagcaggctgcagcagtttccataagtaaagaggagtcaattgctaatagccaagacaatgggaaaaaggcctcagagggatttcagaggtgtcctaggcagccccccaaccatcacaggccttgaggcctaggagagaataatggttttgtgggccaggtctagggcccttctgctctgtgcagcattgggacatggcactctgcatcttggcagctctagcactagccctggctcaaagggccccagatacttcttgaggtgctgctccagatggtgcaaaccataagccttgatagcttccatgtggttttaagcctgcaggtgcacagagtacaagggttgaggtttgggagcctccatctacactgcagaagatgtataaaaaaatgaggatgtccaggcagaagcctgctgtagcgttggagccctcatggagaacttctactagggcagtgtggagaagaaatgtgggttggagcccttgcacaaaatccccactggggcactatctagtggagctgtgagaagagggacatcaacctccagaccctagaattgtagatccaccaacagcttgcactttgcacatggaaaagctgcaggcagtcagtgccagcctatgaaagcagccaaaagagctgtaccctgcagaacctcagaggcaaagttgtctgaggccttgggagcccacccttttcaccagtgtgccctggatgtaagccatggagtaaaaggaaattattttggatcttgaagatttaatgactcccctgctgggttttgggcttgcatgagacctgtagaccctttcttctggccattttctttctttttgtaacaggagtatttactcaatgcctatacccccattctatcttagaagtaactaactggtattgattttacaagttcatagtttcatagacaaggcttatatagccttatctcagatgagactttggagggtggacttttcagttgatgctggaatgagttaagactttgggggaatgttgaggtccgttccaagatggccgaataggaacagctccggtctgcagctcccagtgtaattgacacagaagacaggtgatttctgcattttcaactgaggtacccagttcatctcaatgggactggttggacagtgtccagcccatggagagtgagccaaagcagggcagagcattgcctcactcaggaagcacaaggggtcaggggatttccctttcctagccaagggaagctgtgacagactgtacctggaaaaatgggacactcctgcccaaatactgcacttttcccaaggtcttagcaaccagcagacaaggagattctctcccatgcctagttcaccaggtcccatgcccatggagccttgctcactgctagtgcagcagtctgaaatcgaactgcacggtagtagtctggctgggggaggggcatccaccattgctgaggcttgagtaggtaaacaaagcagccaggaagcttgaactgggtggagcccacagcagctcagcaaggcctattgcctctataaactccacgtctttgggcagggcatagctgaacaaaaggcagcagacaacttctgcagacttaaacgtccctgtctgacagctctgaaaagagcagttgttctcccagcacagtgtttgagctctgagaatggacagactgcctcctccagtgggcccctgacctccatgtagcctaactgggagacatctcccagtaggggccgatagacacctcatataggcaggtgctccactgggaagaagtttccagaggaaggatcaggcagcaatgtttgctgttctgtaatatttgctgttctgcagcatctgctggtgatacccaagcaaacaaagtctggagtggaccttcagcaaactccaacagacctgcagctgagggacctgactgttagaaggtaaactaacaaacagaaaggaatagaatcaacgtcaaaaaaaggacatctacaccaaaaccccatctgtaggtcacgaacatcaaaggccaaaggtagataaaaccacaaagatggggagaaaccagagcagtaaagctgaaaattctaaaaaccgaccacctcttctccaaaggatcacagctccttgccagcaatggaacaaagctggatggagaatgactttgatgagttaacagaagtaggcttcagaaggttggtaataataaacttctccaagctaaaggagcatgttcgaatccattgcaaggaagctaaaaaccttgaaaaaagttagacgaatggctaactagaataagcagtgtagaaaagaccttaaatgacctgaagaagctaaaaaccatggcacaagaacttcttgatgcatgcacaagcttcaatagcagattcgatcaagtggaagaaaggatatcagtgattgaagatcaaattaatgaaataaagtgagaagacaagtttagagaaaaaagagtaaaaagaaacaaacaaagcctacaagaaatatgtgactatgtgaaaaggtcaaatctacatttgattggtgtaactgaaagtaatggggagaatggaaccaagttggaaaacactctgcaggatattatccaggagaacttccccaacctagcaaggcaggtgaacattcaaattcaggaaatacagagaccaccacaaagatactcctcgagaagagcaactccaagacacataattgtcagattcaccaaggttgaaatgaaggaaaaaatgttaagggcagccagagagaaaggtcaggttacccacaaagggaagcccatcagactaacagcagatctcttggcagaaactctacaagccagaagagattgggggccaatattcaacattcttaaagaaaagaattttcaacccagaatttcatatccagccaaactaatcttcataattgaaagagaaataaaatactttacagacaagcaaatgctgagagattttgtcaccaccaggcctgccttacaagagctcctgaaggaagcactaaacatggaaagaaacaaccggtacaagtcactagaaaaacatgccaaattgtaaagaccatcgatgctaggaagtaactgcatcaactaatgagcaaaataaccagctaacatgatagtgacaggatcaaattcacacataacagtattaaccttaaatgtaaatgggctaaatgccccaattaaaagacacagactggcaaacgggatagagccaacacccatcagtgtgctgtattcaggagacccatctcacgtgcaaagatgcacacaggctcaaaataaagagatggaggaagagctaccgaggaagtgaaaagcaaaaaaaagcaggggttgcaattctagtctctgagaaaagagactttaagccaacaaagatcaaaagtgacaaagaaggctattacataatggtaaagggatcaattcaacaagaagagctagttatcctaaatatataagcacccaatacaggagcacccagattcataaagaaagtccttagagacctaaaagagacttagactcccacacaataacaatgggagactttaacagcccactgtcaatattagacagattaatgagacagaaggttaacagggatatccaggacttgagctcatctctccaccaagtagacctcatagacatctacagaactctacaccccaaatcaaaagaatatacattcttctcagcaccaaatcacacttatctaaagtttagcacataattggaagtaaagcactcctcagcaaatgtaaaagaacagaaatcacaacaaactgtctctcagaccacagtgcaatgaaattataactcaggattaagaaagtcactcaaaacagcacaactacatggaaattgaacaacctgatcctgaatgactactgggtaaataatgaaatgaaggcagaaataaaggtgctctttgaaaccaatgacaacaaagacacaacgtaccagaatctttaggacaaatttaaagcaatgtgtaaagggaaatttatagcactaaatgcccacaagagaaagcaggaaagatctaaaatcgacaccttaacatcacaattaaaagaactagagaagcaagagcaaacaaattcaaaagctagcagaagacaagaaataactaagatcagagcaaaactgaaggagatagagacaaaaaaaaacccttcaaaaaatcaatgaatccaggacctggttttttgaaaagatcaacaaaattgatagactgctagcaagactaatatagaagaaaagagagaagaatcaaatagatgcaataaaaaatgataagggggatatcatcaccgatcccacagaaattcaaactaccatcagagaatactgtcaacacctctatgcaaataaacaagaaaatcaagaagaaacagataaattcctggacacatacaccctcccaagactaaaccaggaagaagttgaatctctgagtagaccaagaacaggttctgaaattgaggcaataattaatagcctaccaaccaaaaagagtccaggaccagatggattcacagccgaattctaccagaggtaaaaagagggctggtaccattccttctgaaactattccaatcaacagaaaaagagggaatcctccctaactcattttatgaggcagcatcatcctgacaccaaagcctagcagagacacaacaaaaaaaaagagaattttagactaatatccctaatgaatatcaatgtaaaaatcctcaataaaatactggcaaactgaatccagcagcatatcaaaaagcttatccagcacaatcaggtcagcttcatccctgggttggaagtctggttcaatatatgcaaatcaataaatgtaatccatcacataaacagaaccaatgacaaaaaccacatgattatctcaatagatgcagtaaaggacttcgacaactttcaacagcccttcatgctaaaaacccccaataaactagatactgatggaacgtatcttaaaataataagagctatttatgacaaacccacagccaatatcatactgaatggccaaaacctggaaccattccctttgaaaaccagcacaagataaggatgccctctctctccactcctattcaacatagtgttggaagttctggcgagggcaatcaggcaagagaaagaaataaagggtattcagttaggaaaagaggatgtcgaattgtccctgtttgcagatgacatgattgtatattgagaaaaccccatcgtctcagcccaaaatctccttaagctgataagaaacttcagcaaactctcaggatacaaaatcaatgtgcaaaaatcacaagcattcctatacaccaataacagaaaaacagagaactaaatcatgagtgaactcccattcacaattgcttcaaagagaataaaatacctaggaatccaacttacaagggacgtgaaggacctcttcaaggagaactacaaaccactgctcaatgaaataaaagaggacacaaacaaatggaagaacattccatgctcatggataggaagaatcaatattgtgaaaatggccatactgcccaaagtaatttatagattcaatgccatgcccatcaagctaccaatgactttcttcacagaattagaaaaaagctaaagttcatatggaaccaaaaaagagcccacattgccaagacaatcctaagcaaaaaccacaaagctggaggcatcacactacctgacttctaactatactacaaggctacagtaaccaaaacagcatggcactggtaccaaaacagagatatagagcaatgaaacagaacagaggcctcagaaataacaccacacatctacaaccatctgatctttgacaaaactgacaaaaacaagaaatggggaaatgattccctatttaataaatggtgctgggaaaactggctagccatatatataaagctaaaactggttcccttccttacacctcatacaaaaaataattcaagatggattaaagacttaaatgttagacctaaaaaccataaaaccctagaagaaaacctacgcaatactattcaggacataggcatgggcaaggacttcatgactaaaacaccaaaagcaatggcaacaaaagccaaaacagacaaatgggatctattgaaactaaagtgcttctgcatggcaaaagaaactattatcagagtgaacagacaacctacagaatgggagaaaatttttgcaatctacccatctgacaaagggctaatattcagaatctacaaagaacttaaacaaatttacaagaaaaaaacaaacagccccatcaaaaagtgggcaaaggatatgaacagacacttctcaaaagaagacatttatgcagccaacagacacaagagaaaatgctcatcatcactggtcattagaaaaatgcaaatcaaaaccacaatgagataccatatcatgccagttagaatggcaattattaaaaagtcaggaaacaacagatgctggagaggatgtggagaaataagaatgcttttacactgttggtgggagtgtaaactacttcaaccattgtggaagacagtgtggcgtttcctcaaggatctagatctagaaataccatttgacccagcaatcccattactgggtatatacccaaaggattataaatcgttctactataaagacacatgcacacatattgtttattgtggcactattcacaatagcaaagacttggaaccaacccaaatgtccaacaatgatagattggattaagaaaatgtggcacatatacaccatggaatattatgcagccataaaaaaggatgagttcatgtccttttcagggacatggatgaagctggaaaccatcattctcagcaaactatcacaaggacagaaaaccaaacaccacatgttctcactcataggtgggaattgaacaatgagaacacttgaacacagggaggggaacatcacacaccagggcctgtcagggattgtggtgctgggggtcagatagcattaggataaatacctaatgtaaatgacgagttgatgggtgcagcaaaccaacatgacataagtatacctatgtatcaaacctgcacgttgtgcacatgtaccctagaacttaaagtataattaaaaagaaaaaataaagactttggggaaatgttgaaaaggcatgattgtattttgcaatgtgagaaggacatgagatttggaaggggccaggggcaaaatgatatggtttggccctgggtccccacccaaatctcatgactaattataatcctcaatgttggaggttgtgcctggtgggaggtgattgaatcatgggggtagtttctcatgggttaacaccaccccccttggaattgtcatggcaagcgtgagttatcacaagatctggttgtttaaaagtgtgtagtacctctcccagtctgtcttcctcctgctctggccatgtgaaaatatgcgtgcttcccctttgctttctgccatgattataagtttcctgaggcctcctcagccatacttcctatagagtatgcagagctgtgagccaattaaacctcttctctttataaattacccagtctcaggttttctttacagcagtgtgagaacaggctgacccaataccttagaaacatatagtgaaaacacctctcataaaatgtttgtggattgagggaactttaagaatgtgaattagtaaaatattaatgtggagtttgaatacactattcaaaaattgggggtactacgaatctgtgagttttttattctttaacacattggaataaccctttgttgtgctgtgtgttttttctcctccaactagatatgctctttgaggatcaaatacaatgttgagtgaataatgttgtgtaaatgtttagcaaagaaattattgctagatacccagtgggaggtacatactagaaagagcatgtaggtgatgagggcagtccttaccaatgagcaaggcagacccagcccagtaaaaatgagtaataagaggctgagaattttttaaggagcttagaagattctattgaggatttttattaaagatatcagactaaacacatgcctcaatgtttactgcctccttaaattccactgaaataatagtaaaaggatgaaaaaaggcataaacatataaaaataaagaattttcaagaggagataatagcaacaaaattttggaagttggaaaatacacggatgaatagttactgattagtaggcccaagaaagctgaattttaaatgggaggaatggagacacaatttacagtaaagaattcacaacaatctcaaaaatttgaggcatcaggcacttctagaagttgggagagagtagagctaaaacaagcagtatttattgaaagtctgtttaagaagcagttagaccactcatatcccttctcttatcccatggagccaggtgacaggctctctctaaccctaaagaagacagagggttggtctttgaaaaggtgagtcatagtctctagattagagaacgtcagtcacagctgaggatggagatgatgtaataaaaatacggagataaaatgaatgtttactgaatgttgaaactcaaccagtcatctccccctacttggctctcaaaacattgaaaatcagatttatatcctgcatgcaaaacactagtaaaggcttctctgtagaccctgatcaattcccaagaaaagacctaacactcttagagttcccccagaaaatagcctatccagctcaccccaccatgaagttcacagtcaatgaccccaccggccagagtttccaatctgtgttccagtgtcccactatcaaatatgatcatgcagtgaaatagacatagtaggggaacgcctcaatataaaaaaatagagacaaagcaagttagaggaaacacagactatgaaaggagaagaaacactaggggtaggggggaactactattatcagaaaagaagaaattgcaaccatgaaatgggcagaaaactattaacataaagaatattcagagcaaagaagaggtcttagaaattagaaataagatctcagaaatttaaaaagactcaaaagaaagacacagaaagaacaaaatgaaaaagagaagagacataggagagaacagataagaaaatactagaggacaagtcaaagagcttcaacatctgaataaaaggagttctggagaagatgttttcatccacaaaataattgaagaagatgtcccaaaactgaatgaagtacagagtttccagagtgaaaggcaatcattgtgaaatttcagatacatgtctagaagacattgttagtaccttgaccgggtcccctttactaagccaatgcgtgcaactgctctgcgtgttggctgctaataacctacagacctcttctctggagaattgccttcagcaaagcagaagctgtgtcatctgggaggttccaacaaccactcaactcctacacgggagaactcacaaccaatgactaactgacttgaaggttccaaaggtcagtcaccttgtctcaaaaagggtacgaattctgtggttcaactcttgctccagggcattccactggatcagatggaagctccagtggagaccgcatccttagctcattccctagacccagggtgcttccttagcttatcttctctcccaagattaatgcctcaattaatcacatgcactcaaatttctgtctcagattatttctagaaaacccaacctaaggcaataggagagaaaagattctaaaagtttccaaacagaaaaaaagatgttatacaaaggatcaagaatcagaatggcatcagccttctcaacactggaagctagaaggcatgggagcaattccttaaaaattctgaagaaaaataaatttcaacgtaggattctatgttgaatatctgagataaatggaatcccctttgggtaaatcaaagacattttcagaatccaaattctcaaaaaacttacctcctatgtacttccttctcaaaggtacttcatcaaaacaaaggaataaaccaagaaagaggcagatatagatcaactgaaaaagcatgcgattcataaatttggaaaggagagctgtatttctcctaaagggttgcagcctagaggctggccatcccgcaggctgggaagcatagcctctggaagaagcttctccaagaacaagcacttggaggaaaggaaggaaggatgagacaggaatgtatgctgaatgggttggctaagtatacatattcaacaggttataggaagagctttgaacatttatgaaggggaggcacacacatgcatagaagaatagcatgtatgtaacatgcatcccatgttcaactgggggtggaggcttaatatttaaatgtattacaatgaagccatatacatcaaaaggtgaagcagagggtgcaaaggccttcattgtgcagccctccatagactggccagaaccattccatggtcggtggtctcttattaggaaggaatgctggtcacttgctgtgtcgaaaccacaaaagggaggggcagcatcaggtggttggttaaaatcagtggtgatttctcttcagtccttagggaagaaagcctaatggccgttagtgaaggaggaggtataatgaggtatgtaccacttcccatcctgtcatggctgagaattcagtttttaaaggtttctctggagtcctcttggccaagagggggagttcattcagttggttgggggacttaggattttatttttatttctcacatagaatgcatgaaataaaagatctaagagaagggaaacgtgacacctcttcaagcataagcaattaatagaattatctcatgtatgtaaaagtactgagagttacacaagttggggagaccttagaaatatagtagacatagttgcatagaaaactgggcaaatgggctgggtgcagtggctcatgcctgtaatcccagcaatttgggaggctgaggcaggtggatcacttgaggccaggagttcgagaccagcctggccacatagagaaaccccgtctctactaaaaatacaaaaattagacagatgtggcagcatgcacctgtaatctcagctactcagaagactgaagcaggagaatcacttgaacccaagaagtagagattgcagtgagctgagatcacaccactgcctgggcgacagagagagactgtttcaaaaaaaaaaaaaagaaaaaaaagagaattatttattaaattcaaggaaaacaaaactttgctaggaaagtaatatacacgactcagctacagagtttacagagacattattatataaggactacttatcaatcaaattacaattataatatattgagaaaagggggtcagaaatgtctgtgtgtggctgaattgagtggaggtgggaaagagggataaatgctcatttcccatggttggaatggttggaaatcaatagacaatgcttaaaactgaaaattcctgagtttcagtagaagcatatgatttaagaatttggagataaagaccaaaagaaagggccagcagatttgaaagcaagagtcatttgggagtgatgagcagatgcagagaggctgctgtgtttttctaaatgtcttatagatgtatttgattctttaaatcatgtgcagtataatcctgatttaaaaaaaaaaacaaataaaacgttaaaatgcctccaggagcagaggatactgactctgtttttggacaaaatgctgtgaggaagtgattttgatcaggtcctggtttagagttcagggtggggaaaattttttctcaagggacctaagctgctgagaggaaaaagctgactgtagatcccagaggtggaagttgagtgccaaagcacaatgagcataaaagcactctgaccccaaggtcagagcggaccctgctgctggttgggagaagagtgacaggaggccagcgttttatgggcttcacaacttgtgaactcaagtgtggtcacacattccaagtctagacatcttttagttcaaattatccaccccataaagtgaagcaatcatagcaaagatttaaagatgcatatattcccacatattcctaaatctgttatcatacttcttatggaagctgacagccatagattactcggttcagacatcagaagctgatataaaccggcaactgagtgccttaaaagtgttctaccccaagtagaaggaagtgtttcagcatgcaggagcagtaccaacaaaaaacaatggaatcaacagtttgtcttgctttgcacacaaagagcaaatgagctctagtcagagagcttaaatgtgacctctccagctagggcagctcatcaaaattgatggccagtggattccacagccagcattaaattaccaaccaacatctaagaggtccaaactcctctctcccttcaaataaccctaacagcctccctcgaaactttctaacctcttgtacccacccacatttaagtgaggccacctccccgatggcagccctgtctcacttctcactgcactaatctaacaggagatcaaggatgtcaaatatctcccatttcttttcgcccctggttactttggaagcatccctcttaaacacctctcccagtcaggctagtcctgggcaaaggaaagctgtcagacttcataagaaggcaatctgcccttcactttgccaatcgctaaatgggatcaagaacggctcttgggcattggatccaaggttacaagggagatgtcaaccataatagtggggttaaaagcaagccttagacccacccatgaagcccctctttgggaaaataactgagtcttgcaaccatataagggttagtcccaataagccccttttctccaatgcccttagactaattagtgataacaatacatcacacggttgagaaaatgagagggaaatgaatgtttctagacctgtacggaagcgatttgagagttgttagggaaaccacctcccttattaaaacaaaatgcagaacctccaaggtttagcaatagaagcaaaagccacaggagttgaagctgaaataatctagtggccaccacttagtgccactaagtacagtatcaaggttagaattcatgttctaggatctggctgatttagattcaaatcctaactcctttacttcagagctgtgtagggttattaaagaaagtatctaagtcccctgagccccaattcctcattagtaaaataggttaataatgtattctttagggtgcgacagcaggaggcctgaagctagtgtattgaagtgtagacacatgcagggtgtaacaagtgctcattgaatgtcagctgctgttgttaggatgggattatcttctccctagggtttgatcactattacagatgccatctccaccttgattcccagaagggtaatgctccctcctttaatgatttacagtgtttttttttcctgtgcacctatatctatatacagaaatatatttacaaagttacaatcttactaataagtgacagagccagcatttgaccctgtgtttgtctgactcctgagctgcaatgaagaagactcgaatgagtccccaaaccacagggatgctatgcttaggatagaatcttggtgacagaccaagacactgattaagaggcacaattggtgtgccatttttctctcattcattttcttgcttcctctttctctctacaagcaattgggtggatgagttgaggtagagcccactctacttcctttaaggtccttactccaccggtctagatagagggtagaaggattcggagtggctgaagatgtaagctgagaaagtgagttttccactgtcacttattgatcaaccgtggttatgatcaggcaaagtctactgatggcagatttgtcctggctatttctgatgtcctatcagctactatataggctgatgtgcaatcagtccagttaacacagaatttttgataaggcctaaaattccaaatcaacattccagccctcctgattgtgccataaattctgggactctggttctagtaacaactgaggcaaacagaaatatttatcctgaattgtccttctacctgaagtacctgtctgacctttaatttgtctaaaagctactcaagagcagaaactgcatcctctacttatttcatctctttaaagcctgggacacagtgttgaataatgtcttttgcatagacttcctttattgacctttatagatttctgtaatagggcaatatgtgcaaatattattagaattataaagtattacataggtaaagacaaaggatgttacccagtgaataaaaccaattccagatgatcagaaattcaatataaaaaattcaaaccacctatcaatgaagaaaatgtagtatttatcaaacctctaaaatagagataattttctaagcatagaagtaataaaataaataatgaaggaagagattgactggtttcagtacattttaaaatttaaagcttaagtaaaaaacaatcttaaagactagaataagtaagtcttgaaaatatgtttgaaaaagagttcaaatttttattcaataaggagctcataaaaattttaaaaaaacaaaaatcttcatctcccagtaaagaaaattacatggacaaaaattccaaaagaagatgagtattctcataaaaacctgtttgcaaatatttatagccactttatgcataatcactaaaactgggagacaaatgtcccagctgtctgccaactggtgaatggataaacaaattgtggcacattcagacaatcaagtacccctcagctagaaaaggaacagactactgatacatgcaacaacgtggctgatctcaaaatcattatgctaaataacagaagccagacacaaaatcatacgaactgtatggttctatttgtatgacattctggaaaaagtaggagtaaaaatcatgagaaaacagattagaggttgccaggggtgggggattgactgcaaagaggcctaagagaacttagagagtgatggaaatattttatatcttgactgaggtggtagttatatgattataaatacttgccaaaatcatatgcctaaaaatgattaattttaccgtgcatagattgtattgtaataaacctggcttcaaaataagattattaaaaagtgtttcacattattagtaatcaaatgaaaattaatatgagggggtcattttttaatccattaaatttaaaaatataatttataatatccaattctagcaaggcttcaatgaatcttgtattttcatatagtaatgttggtgatgtgaattagaatgactcttttggaaatcattgttgaaatatgtagcaagatcataaaaatgtgtaccccttgacccagcaataccaatgatgggaatctatatcaaggaaattttacaaaatggcttgaaaataatcatatttatggaattatgtgttatagattgttaataattttaatcaactagaggaactcagtttccagtagtgggggaagggttaaattatcatggaaaattatatgaaaacattttgcaacaattaaaatggtcatgataaagtccatatagtcacatacacatttggaagtatgtatataatataatgttactgaagaaagccaacagggattagccaacatgcattctggaaaggcagtaagtatggtggtgaagagcatagcttccagagctgaactgcctgggttaatattcaacccctgcaaccttctagctctgactttgggcagcttacttaacctctctcacactcactttcttatttgaaaatagaaaacaaaatagtagcttcctcattgcttttttccaagggtttgatgagttcataaatcacataaaacacaaaactacttggcacaaagtaagcactgtatgtaatcatgtgctatgctgttttatctctgaagatgtaaaaggactggacaaacagtattattttggtgtatgtggctgtggaattattacattcagatgattaagattgctggcaatttcggccactttttcaatttttgcattttgaaaaagtcaatttgatttttaaagacttgcatagatcccaccacagttttactttcagatttcattgaatgaacattttcttaatccttttttttcccctttcgcttgcttgctagtggattttcaagtgatggtgtgacaaaagggccaaagggctgtgtacaccaatgattcctgtaaatcccattgaaagagacactctggatgacaggaaacactgcgtaatgactgaagtatcaatgaatgattgatgctataattagtattaatattaattatagatttttttatattaaataatcaaaagggcctcaatttctgatagcaggggaacagtgaattatattataaaatagttacttaagggataattatcaaaaattaaaattatgattataaagattacatggtcatacgtatgtatggaaatgtgtagaatacagtgttagtgaagaaagctaactatttctgtgtcttgaaccatggcttaagatgcatgggtgaggagtgaattcctttattgaagatagggagagtctgtcccaaagcagtcaaagcatggctctgccttctctcttgagagctggcttcgagaatgagctatgtgctgggtaggacataagtggagccctttctcacggggaaggttggccactactgtggcgccttcttgtgtgttccctccagcactgctagacaagcccgtcctcgaaacaaatctggggaaatttatgctgacacttggttccacatctggaaatgctgagggtcagttatgattcttagcattgtgttcattctcttcttaagcaaaacttcaacttaccttgcaggccagtgctcttttttccagacacccaaggcattccagcaatctcctttcccaaaactcaatgggtttaaatgttcaggccagaagacctgcaatttccagtgttttccattgcagaactttagacctggatctgctacctgttaggttctggccttaaggagatgtattttaaatagtactccctggatgaatgataccatttacatttttttcttcaaagaacttcatgtgtcttttaggaactgattaaacttggcaattaagatcccatgccttaggcctttctgacgggaaaatgttaaaaagaaacaaatgaaaatttttatcaagttagaaaaccaatgaaaaataaaagtgaattaaaggaagtttttcttgttttattttacataaaagaaaatgggccaggaatggtggctcacccctgtaatcccagcactttaggaggctgaggtgagagtatcacttgtgcccaggagttggagaccaccctgggctacatggtgaaaccccagctctaccaaaaatacaaaaactagccagtctcataacccagtctcaaaaaaagataaagaaaatgatcagctaaaggaaatggaagaatcatctacttcacaattaagagagttttatctttatttttcctatcttttgcttcatggtttgtataattcatctttcagtggagggaaaaaattgtttatgtgtactttgacctagttagagaaaaggggggagagcaattaaacatcaagaagtactttgttcatcaataaactgctattcaaaagggctgcactagctctccacccccacctcttgttttcaatgtcataattatttatagggccagttggagtctcaactctgctaaaacaatttattcgagggcctcagcccttatcccaagcacaacactgccccattaggcttctgggcaaatgtttgttcatatgggtcctaactcagctgtcagttatgtgagagagagtgtgtgtgtgtgtgtgtgtgtgtgtgtgagagagagagagagagaaagagagagacagagagagagaaagagagagaaagagagagcgagagcacgcacacacgtgagagagaggtggcgagggttactcttaatctgggtttttctggaacatctgagcacatattgtggctgagcactatgaatgatacagtaacacaaggtgagaatctcttcctttttctgtgccaataagttagtcctgacactgccagagagacaaatcctccacccactgtccaccaaaatgggaaggccgtaggcatttgatttgccatggccaatgaaacaagaccacctctgagaagagcacatgtgtgttgggtggggtcaagatatcctcactggatatagacatccaggcctcatgttccttgacatggtagtattcaggaaagctttgaaaatctgttttggcctaaagtgcatctgacactaggcaagtaaacacactataaaaactgaacgccagacccagcaccctggtgtggtatttccttagacctcaaaagtctgatcaaagaaggaacatattagcttagtgaaaaagtaattgtggtttttaccattactttcaatagcatagaggttaaaaatatggactctggagcctgacttcctgcatgtgggtccctgccctgccactgattagctgggtaaccttaggtaagtgacttaacctctctgtttatttttctgtaaacaggagatgctaattgtacttacctcataaggctgttaggaggatccacattagcaaaatgtttaagccagtgcctggaaagtgctatgtgagtgtttgccgagtaaaattaatagatttgtgaaacaatttcattcccagtcccatctgttttcacccagggattctgtttgatttaaaaacagttattaaaagtttcttggctgggcaccgtggctcacgcctgtaatcccagcactttggtagaacaaggtgggcagatcacctgaggtcaggagttcaagaccagcctggccaacaaggtaaaacctcatctctactaaaaatacaaaaatcagctgcgtgtggtggtgggagcctataatcccatctacttgggaggctggagaatcgcttgaacccaggaggtagaggttgcagtgaactgagattgcaccattgcactccagcctgggtgatgagagcaaaactctgtctccaaaataaaaaagtttattgcttgcccaagatcttttattcttgactttcaaattaaatgtatttgggtgagaacaactttgtcattggaagtaggagcattgaagagatgagcatgatgaatcagggttaaaatgttaattccacactcaataactatagggacttgagaaagtttcttcacttctttgaactcaacttatacatcagtaaattgggaataatgtgaacctctcagggatatcatgaagatgaaacttatgtgtgaaaagtactcggcacttaatccagtggaaaaaatggttatcttcttgataagttccaggctgtatctttttgctttaacctccttgcattcaactcttacaatcttctaaagcctgcctggctcactgattcatagtagatttcatagtcttcttctgatacaaacagttgaaactttatcttctttgggttgttttgctattatacacgtactggtgagatccaaagagtgggcaaaaattatattgactgctaagaatattttgagaacaatacatttcaggaaaatcctcgagacctgggttgctcctctttaagatcaatcagcaatgcgccctagggattctctcacatttctgccgtttgcaaaactctataccattaggcagatgtcacccagagctgcttgtcttttttcaacagaattttttttgaaaggtgagctttttaaagagagtttttctatattattttttcattgaaaattataattaaaaatgtgtcaaaattatccatgattttcagctgcctgacatttgtctcacatatgtttctttttaacacaaatttttttttctcctcaaagtcaagtttaagacctcaaatccttctttaaaaagtatttaaaagattgagcaagttgctctccatggggtttgctgacgcaggggctcctgtgtttgtttttactaaagaatggctgtttccctggtctggttactttactctctgtattttccttggaaaagtcaccaaactgaccaactgtctctcctggagagaagaatcctgtagctgttagtgtgcgagccacgatgtgcttctgtcacagatagacaagcaaatcgcaagccctggaagaccctgggccgttccactcctcctggaatgcactctaagcctcagagacaccaatgtcctctccaaaatgccttactatctgccctgtgttgctccatgaaaaaattaagtttctgtgctcaagcaggctaggagaatctttgagttaacttatgatgcaaattatgcttcttttctcaacgttacaatgcaacattaacatatgaaagttgccatcagtttcttagtcaagaaatttaacgttgcctcatgctaactagaattgtttaacctggaagcccacttttcaatgttatctattgcaagcctgggaacttggggttctacagaagataccttgggaacctgtgttatattaaagagtgctatgacttggaaagtcagctggactcaagctaatgtgccaagaatggttcagagtgacaatttgtccatcttcatcaaagctcctctccctctcaccaactctggcttggagaatcctactcctttaagcccacaccagcatggttcaagagtggagatgcaacaatggaataccattcggccctaaaaaagaagccaatcctgccatttgcaggatgctatgctgatggaaataagtcagtcccagaaggacaaagacaacatgcttccacttacaggaggtaaataaaatcatctaattcatagaagcagatagtagaatggtggttgccagaggctacaggagggggatatggggaaacattgtttagcgataaaagtttcagttatgcaagatggatacgatcttctgctgaacatggtggctgtagtccataatactgtattgtgcacttaaaaatttgttaagaggtagatctccatcccatgttaagtattcttttgtttgtttgtttgattgttttgagacagagtctcactctgttgcccaggcgggagtgcagtggcgcaatctcagctcactgcaagctccacctcccaggttcaagggagtctcctgtctcagcctcccgagtagctgggattacaagcgcctgccaccacactcagctaattttttttgcatttttattagagacggggtttcaccgtcttggccaggctggtcttgaactcctgacctcaggtgttccacctgccttggcctctcaaagtgctgtgattacaggtgtgagccaccatgcccagccccatgttaagcattcttatgacaagaacaaagagacacaaggaaacttttagaggcggtagatatgttcattaccttaattgtggtggtgttttcatcgctgtatgcatatgtccaggctcatcaaattgtatatagtcagccctctgtatctgcaggttccacatctgtagattcaaccaacctcaattggaaaatattcagaaaaaaaaacaatgaaaaatagccatccaacaataaaataatacacatattaaaaatacaattcacatagcatttacactatattaggtattataagtgatctagagatgatttaacatttatgggaggatgtgcataggttatatgtaaacacttcgccattttacataagggacatgagcattatggattttggtatcctcagaggtcctggaaccaatctcctggtgtttgtttgttaaatatctgcagtttgttgcacatcatttatgcctcaataaagctgtttttttcaaaaaagtgtgagtatgccagtgagtatgagtatgtgcactgtgcccatttatgtggtcacattccaaaatcagatgtatgatttaggttatttatcactttgcagtacttactcctcattttcaccttgtttgcactgataatttagattgagttagatatctggagagaatatctgtaagaaaatagaacaaaattagtgttatagcagaaggtgaaagcaacgccatcgcagcacaccagccatgaggatccataagttctgcagctgtcctgctgaaactgccaccaccaccaaactgcccactgtgtgaatttggtctggtttcctgacatgtatttacctcctcttcctgcacccccaatccctgcaaaaataggaccgattaagatcaagatatattttggcttgttcaataacttctatttatcttgaaataaagttcagcctttctaaatgttccgcaaatctctgcaagatctgacccctgccttcactcttttcctgcttcatgtgttagaatctaggcgtttgttattttctcccagttcctacaatacaccatgctttctgcaattccctctgcttgaaggtctgtagctcattcccttccctcaccaaattctccctggcccccaccacagccttgtgcctagctgattgcccctcatcttttatgtcattgtctagacatcatttcttccaagaagcctttcctgacccttccacagaactgggttggctgacccttccctggcctcccttagcaactacactacccatttcattgcattcccagccctccactataactgagtctgcttattgacctgtattcgccacgggactataaactccacaggggcagaaactcactctgcattatttgccattatacccccagggcctagcccagaacctctaacgcagcagctgtacaataaacacatgttgaatgaatgaatcagtcagtaagtggatcaatcttacccttgttgcaacatataatagtatgattctatcatcagagtcccaaacctcagattctcatttcccaattttttagatgaatggtataatacagtccaactacacagtctttctgaagttatcttcctcaaacacataggtgtgtgtagctgggagggctccctgtaattgacaaaaacaaagtatagcctcatgtttcctgcctgcctgtgttgagtcaaccagctagggctatgctttactttaccatagattttatatctaaatcatacttcatcagacgttatatctaaatcatcagattcaaaacaatttaactggacctacactcagtcttgccagaaaatctgcttcccgttttcatgacaagtcatgcatgctctggggctttcagaatcttgcttctatttttttagtctcattgcataataaaacacagatacacatagtcacacacaagctcaacgacacaaatacacatagtcacacacaagctcaacgagacccatgtttttcactgttcttttacaaactgaaatgcaatcttatccagctgccaaatgcatattctaataagatgacaagaaattatttccctaattcaataatgaatcagtctgtgtcagacaggactgttcaccacaactcccttcctggttggaaagcaaagcttgtaagctggatggtttcagagaaacaaattgctcctggctgcaaaatgcgatgactgtgtagttgaccaagaaaaacacaaaaacacccctaggagatgaattacttgaaattaggaaggctgcattcctagagccagatagcagaactatttcgcccccataagacatgatgctggagttagtcaggcatttccaggattcatgctttgtggggaaacatgttgaccccattgcagaaaagtgttctgagagggacacgttgtaagcataaccactgcatactgaaggttttgaatagtattaagggaaggctttctccaaaaactctgccaccacttcaatgactggaattatggaaagttttatggcagtgggagatggctcaggaataggattgtaaaaggactctccacccaaaactgtagattggccactgaccatatgctttaccctttcagttctctgggttgtccaaaacccaggaagataatcttcctttgttactgtactgcaggttgctcagctctcaaagctcattcttcgctctttgtattactataggtacgtaccatcagttagaaggtgtcaaagaatgtagggaatgacttgtagggagggctggcatatgaattagagtaatagtagatgctaaaacaggtaaactccaaagtccctgtggcttaacacagtgaaaaatgttagaggctaaccagctggagatgggagcatagcaggaggccatatccagagacccagactgatgggggctctgccttcaatatatggcttccaaagtcaccctgggcatggacatccagtcagcctatggatgaacatggaacatggaagactgtatgtgagctttctatggacctggactggaagtggtgtaacccacttttacccacaaaactcaagcacttggctccacacagctgcaaggaaagctaggcaagtggtctggctttgggtccaggaggtagaggaaacaggtttttggtgaacatataccattcttggccactgttcaacactttagtcaccaaatatctatttcacatgttctcccacatcaacaacaaactttccccttccccaagagagataacccaaagtcccacccaatcacttcaaaggacagcaccttgaaggggtactaactcctttctgtctatcatatccagatgcagctccttgtgatccagtcacctttgaactaaatatcacatacacacacacacacacacacacacacacacacacacacacacactatacagtgggaaacagaataaccacaatgaatactcccattcacagataggaaggatggcgaatactcagcagtcactgggatataagcaatgacagaatcttggtgggcaagtattagaaaaacttctactctgacgctaggagagctttcttgattagaccctggttctgctctctgagaagaacattagacagaggtctacttttctccatgacccatggctctaccctctgggacattcctgcttgttcctcatgacctccttggctacatttgaagtggatgttggaaagtatgccatctttagaggtcaaaacttgttcccgtgggttcaaatttggggtcccaaatgttattttaagtcttaattgagaaaatgattttttagtccaggtttatatttctttgttcatatttctttggcaataaaatttcctcaaaacatagtatgtttcctatgtatctgtttccaattacctgcctatgtcagttcttaaaaataattctcaagtcggatacagttctttgcttctttggccttatttgactctctctcaatttaatgtcaaccagcttgaggccatgcagcttggatagaaaagccatatacctaatctgatctttgctataaatctgaatctcagtgagccattattgctttaaaagtttctcaatattagttcctactgtttgaggcctagaagcagatgagtttttaaatctttcaatacccaaatatctggactccatagattcatttttatttatgatttcaaatcagcaaatctttgtctgaactaatccctttctttgataaggaaagggattactttgatatttgataaatgcatccagtcacaacaaacacacactgttaacattctactttccaatctttgttcttaaagtaatgttgataggtacttggtcttcctgccaaatgagctcaagtacagttttaataaatgctttgccactacaggtcatggatcttagactatctttccaacctccaataacactacctaccacctgactactaaaaatgttacttaatttaatcggaatatttactccattgatatttagtgtagttaatgatatactagggttttatttacatcttactatttattataggtgactcatttattcctttttatctcttttcttgccttctttgattaatcaactctgtgattattctacttttttcttaatttaatagttaaacacacttagttattcatttagtggtcacttagacatgaaaaatgtgtccttcacttattacgctgtagtacaaattactatttttaccaattcctacataatgtgaaagctttagaaaactttaactccagttataccatttccaacttatgtattaatgttgccctgaatattctatccatatattatacaattaatatttaatcagtatttgtttatatgtatcagcatacagatagcaatatttctgttgctctttaatttcttcttacaattctgggttctccctgggatcactttccttctctctcaagaattcattttagaatttctcttattgagggcttgctggcaactaaatctcttatttttgttcatctgaaaatgtctcttttcccttgatttttgaaggcaattttcttgggttatggaattgtggattaatgtctttcagcgtttcaaaaatgtcatttccttgttttgaagttagttgtcagacttgtttttgcttctttgaaagtaatgtgtttttctctagctgtttttgagacttttctctttgcccttaatttttagcagtcttactatgatatatctagatgtgactttttatttatttatttagaggcagggtcttgctctgttgcctaggctggagtgcagaggtgcagtcatggctcactacatccttgacatcctgggcacaagtgatcctcccggaagctcagactcccaagtagctgggactataggcatgtgccaccatgtctggctatctgttaaattattattattttgtagagatggggtctctctatgtttcccaggctggtctcaaactcctgggcttaatcaatcctcctgcctcagcctcccaaagtgctgggattacagacatgagccaacatgcccagcctagatatgactttctttgcatttattctgtttgggatttgcaaaacttcttaaatctgtgggtaaatatctttcatcagttttgaaaaattctcaattactatctcttcaaatactgttttgttctattctctctctgacccactatttctctctgctctcctactgctactccagccacacatatgccccacatatttcaatgatctttcttgtagtctcattctttttttctctgtgtgcttcagtttggttatttttcagttgacctatcttgtgtttcacaaatcccatcttctgctgtgtttatctgctgttaaatacatctaatgagctcttaatttcaggtattgtgctattcttctagaatttgattttattagattgtttcttgtagatgccaattctctgtgaaattctattttatcatctgtttttcctaccttttcctctatttttataaatataggtgtcatagttatttttaagttcttatcaggtaattccattatggatctgttttgatggtctggtttttttttattcttatcatcctgtcttttgacataaccagcaatttttttagtccaatgaaggacactgaatataaaaggtatagagactccagatgatgctatcatctttcaaagagcatgtattctaccttccattagaccaatagatgctgttatatcaaagttctgttgcagctcccacagctttaatacacctcttatttgcccctgaactttaaggtttttaactgagaacctaatacattttacccagccctcctccaggcagatcttgagccaaaattctgctctgattttcaaaggctgtccgctaatatctgtgatctcccatttagtacagacctccaattatgcaaaaatcctcaagggataggaagtcttgtgcttgaggccttcaattctcttctgaaacatgcagctcttgctcttctgaaaggtacaaacctgagatttttaagctttcagccagagcccaaatatggcaaatactcctaggattatattggatgtcgaagtcagttcaattctctgaggtcactcctctctgaagtcttatccctaaagttgttaaagctgatgagcttgtctcatcagctctccagacctctgaatctcccagggaagatctttctgtgtgtatgagatttatgtttaaaatcaatttatttattttaattgacaaataaaaattgtatatatttgtcatgtacaacgtgatgtttcaaaatatgtatacatggtagaatgcctaaatcaagctatttatcatatcatattcattggcttacatacttaccattttttgtggtaagaatacttaaaatccactctcttagcaattctcactaatacatgttgttaactatagtcacatgtacaatagatctcttaaatttttcctcctatgtaactgaaattttgtaaccttgataaatatctctccaactccaaatcccttccagcccctggtaaccactatttcactttatacttctgtgagtttgattttttagatgtcacatatgagtgagatcgtgtggtatttgtctttctgtgcctggcttatttcacttaacataatgtcctcaagattcattgattttgtcacaagtgacagaatttctttcttaaggcagaatagtattccactgtgcatatataccacattttttgtccactcatccatttatagacacttaggttgatcccacattttggctattgtgcataatgctgcaatgaacttgggagtgctcttagacatactgattttctttcctttggatatatagccagtagtagaatttctggatctgggagatctggattaaacttcaggttctcaggccatgtactcaggccatctcaggggattttgagaatgcggggcttgtgggacagagtctagaaatcttcccagatgatttgatgcagctagaccagggattatgtgctgagaatactggcccacatccttggcccttgtggtaccatctctctcaggatccccatgtacagaatttactttatacatggtgtaattaattatgtaaatacaggtgctaatctgtctgccagagcaccttctgacactgcccccaggactcctctccaggaggggtctgacaccatgtaccagctactgctccagatatcagggccttgaaccacccaacacagcatgttactacatccttacttatacagttgccatcccactgccattccagccagaaatctcagatgatgcctgctgcatcacacaagctcatgaatcctccctccttagattggatggaatgtcatttcttaacgtggcttttcttctcagacccatggtggaaagaaatgtttgagtgaggtgccaatggggttcatccatgaattatcaactatttcttaacacacaattttatctgtggcatagaacagaactttagtgttagagtattttttctgtgtctctctatgagtgtccctggaaaatataggttaaccatctgcaaaaacttgagccttgtgggttggtaagaattgaacccaccaccaaacttcttgatgagtaagattttttttaaatgcctatatctgtctgttatttgcagccaaaagcattctaactcatgcaaattttggcacaccacagcattataaacagcaacatcctggaggcatatactcagaagcacagagctctctctaatcagggaataatgtggggaaagtaattaacggctggtgatcttcttagtgtgaacctgattccaatgaaaccaacctatcccttatatctaagttttgtcctgtagacatgatgacttgtaactctacatcaagttgtaccaggcatcgttgcctctggattttcatgcctgggaggaactataagaggaattacaaaataagaaaggcaaacagtgcgtctgctaaaaggcaagggcttgaggccacctgtgtctcgttatgggtcatgactcattagaccaactgctgttctcacttgcctcattttttccacaagagaatagagaaatagcatccagggagctgctggagaaaattttcacatggtctcttcctaggagagctctttcttccctggtatatttttattcttagctagatgcatctctagctagcccagtactaatttaccctgaagtgataaggtactcagtgcctcctaaattctcaccatagaaggtaagaaatttgaaatcagtgttctcaaagaaatccttcaaactccagaatccatgctttggaatattgttggacctcagatgagtcttcatagacaaaggaaggcagaactttttctaacatgtcaatttgaacaatttagcttcaaaaccaacaagagaccaccaaattgctattacttagtgcgaggcctaaattcatgtgtgcaataagaataattgctaccatttactgaacactttttatgtatgaggcactgtgctaactaagcattttacttagggatatctcttgtaaacatcacaacaatccttttaggttggttttggtatccccatttgactaatgaaaactcattttcctgattcaaagaattggaatagctcagcaaaacatgcatgaagcagaacaggaataaataaaacaagagctcaatgacagtgataaattgcaacagacacacagtatcatttgggggagacaacagacacaggccttgtctcaggtaagggtagcgacccctcttcagtttcagcttcttttactgtgagggaacacaagctcagtgagtccagatcttcagtttttcaagagaaagcagaaatccaaaattgtatgtgaaattaaaatcttattgttaaactttggcaactattaaaaagattttcagctgtctgcagccaaacaaaatacagctgtggaccggattcagcttggaggctgcctgcttgcaaactctgtcctctgtcctgcgcaattgggaatcactcggggttcttttgttctcttaaagaaacatggctccttcaaccagaggccagagtgctttcaaatatcactaatggttcaatagtgtggcttaaccattacccacccaccatcccttaggaatacagatatctatgactcctggtgacattcatgcataatttgtaaatacattatcctgtgagacttgagggatccaagcagtacttgagggggtacacaagaaagaagaagatatgagagagaaaaggaaaaatgagaaagatgataggggcaccctgctgaggactgccacctcctaacagtctctggcccctgcctgttttcaccattcagacccctgaagcccagtgttcagagcctgggcccaccatccttcatttctgatttctctcctccaaggagataaggacgagccagggcctctcggtgtgttttacatcaaaggccactgaagggtcttgacaggctggatgtcagtgctgtaaataaaccattaatcactctgccatttcatggacacactcttcccagagggcatgaactttctccagggcactaatataaaccacatctttcctgagccaatgggggaggcagagtggggcgtcagagctcagagagcaggctccctcattgacacaaccattactctcctcttaaaaccacaggtccctgtagcttggaaatggttaatgaaaagagatacagttgaaacggattcaacaaatgaagtcacagctttggggaatgtgtacaccccaaggcagctccttctatcccttctaaactctccacctctaaagaaggtaccaagagaaaggccacagagacacaacaagatattaatgatttcaccactgacccaaagcaacactcctttggcagttctctatagtctgatttctaagaattagagcccagaaaaaaaaaggtataaaatgcttttccagaatagttcccctctatgtgtggaagttggagtcactggaccaatggtcctaacttggccaaggctccctaccgtaggccccatctttagtacagatgctccttgagcttctgctatggggagacactgcttgaggttcagtaaaaagacagatgaggcctttgctttcatggcctcttcattcctgttggggcaggcagctgctgaacaaactggatcaatttagatagtgataaacctatagagaacacaaaaccagaaggcagtatcaacggtgataggggaatggctacttaagtttgagtaggaagatgaaggcattcattcactcagcaactaaacatggtagcagacactagggggttacccaagaggtaggagtgatgtcaatgtttgaaggaccttatttttagctggagagatgagatgagcatgcaacagtcctcaagaaattatacatatgcaaaacctccatgtaaacctataagattgaaggctgacattcaagaaacaaggaagggatctggatcaggacaagttaaagacaggacatgcttctcaaagataagtctgagccattaggaatacaaattgtggatctaggttgtgtcaggggagagagccttcaggccttctcactgagtcaccgggaactagaattaggatttgaagtccagcgctgaggtccccacactgaatcgacaggcagggaaaataacgaggcaccattctgaggtccaatttggaaggaagggcagaaagagaaataatactgcacttcacataaattccagatgccttcccctggcttcccaagcattgccttcctccctaccatggtctttcacccctccctcttgctgcggccacactggccttctcaccaacactcacccgggctcacacttgtgcatggggactttgcatttgcaaattcctctgctcaggaagtgcctcttttacatctttgcaagtctgattccttcttatatgttaggtcttggctcagctatatctcctcggtgaggcctccctgcaccttcccagttcctctccatcacttctgtctgacatattttcttcagagcacttgactatctgacatctcttgttcctttatttgtttgcttccctgtggtctgtttcccacctctaggaagtaagtttgatttgacatggaagctgtgtgctttgtctcctgctgtattgcctttgctaaaatgccacctggcaaagcttaacagagacttgttgaagtgattagttagctaagtgcctacttggcaccaagcattatgctatgctctttccataataatatgacattgtgtgcaatcctcataacagtgcattgccccaggtgttgtcatgttcgctgtatagatgaggaaactgaaacccagaaaaacctaattaatgtaatcaacatcatgtagctagtgagaagctactgaacccaagtctgtctaaccctaaagtccacatgttttccactttaccactttcttcctgggggaaaataagaagtaaaatgaggaatgttaaagacccaaatcaggttaagattcatgtgtcacaattagggacccaggaaagtcaatgcagttgtccagtgaagtctaagaacaccaggggtcaagatcagtgtgtgtaagagcggcgtccctgttcacattcagctgctggaacagggcacgggtggggaaggaggtcatcaacaggagaagagtgatggccacttatatacctaccgcttatatatatcttccctgcctgtcgattcagcgtggggacctcagcgctggacttcaaatcctgattctagctcccggtgactcagcaagaaggcctgaaggctctctaccctgacacaacctacatccacttatacggcaagacgctgagtaacgccaagcacacctctaagtatgcctgggctgggtgccatcctaatgccacttactcccagagcttcatcatatagagaaggcaaaagcaaagaggaggagaatgatacattcaacacatgaagatgggctcatcacagcaatgatgccttgcctcaagggcagataaagagaattaaaattgtgcatatgatatataaccctgtaaagtaaggttgacctgggctggccttgcccagaatgtccaaacaagaaatgggaagtaagcctcaccactggcagagcaccaatctgtgaaaatgcttgttgagaaagactctgagggtcaggcagtgcaggtagcagaccactgtatgatcactaagcatgtctgctaaggtgaaggtggtggtggcagagatgccccatacactgtgtatttgctactcttggtgcagaattacactggcttccacatgaatgaatctgctgccatgaaatgacaccaccagcacccaccctcagcattcagacattaggccagccaccttcatcacctgcattacacagaaataaatgtactagctaccttgactccttggaaagatagtgtgacaatagccaccatgtgctgtttatcatgtgccctggtgttgcaagggaatttatattatctggaatccataagcaaatattattatcttcacttgaggaactgaggctcaaagaggttaagaaaattgtccaagctgggtgtggtggctcatgtctataagcccagcattttgggaggacaaggcaggaggatcctttgaggccaggagtttaagaccagcctcggcaacagagcaagactctgtctttacaaaaattaagataaaaaaaattagccagacattgtggtatgcacttgtagtctcagctactcaggaatctgaggcaggacaatcacttgaacccaggagttccaggctcaggtgagccacgattatgccactgcacttcagcctgggtgacagagtaagaccctgtgtcttgaaagaaggaaacaaagaaagaaagaaagagagagagaaagagagagagagagaaagagaggaagaagaaagaaagaaagaaagaaagaaagaaagaaagaaagaaagaaagaaagaaagaaagaaagaaagaaaagaaagaaagaaagaaaagagagaaactaaaaattctgaagtcacaaagagtgaagccaggattaaaacacagcctatctgattgcaaaaccaaggttctttcaatgttcttgctaccataccagcagttttcagataccagtctacacacgtgtgaggaatcatttcaccactacatgacaaaatgagaaaaataaagacaatgtcataatttccttaattctacattatctattgtaagacaaatgattatttaataaatgtatcaggggaggaaaaaacactatagtaaatgttcatgttgattaaagaaagtaagatagacggtgatttcaaaattgttagtaaatgacaaaagtgtgtcttgcaattgaagaaacaaggaatatgttgggtaagattccatcataacttaagaactgtacatttattctgagtttatgtcattcctggtttcgagtatttaacttttacaaaaattgtaagattatagatgatagctgcttttaaaaaaatcattagttggcaaaaactaaaactaaaagtcctctctgatctcttttactatttgaaaagttcaaatggttgagaaccaatacaccatactccatggtgtctcactcccattaaagatgtcacagtctcagggctcctaagtcatattcagaccacagaagtacttcggtttggccacatggatttttaaattttgtgttaactgacaatattttaaatgggagaatttgcatacaactctcgatttctggcttttctttacaattcaaaatctggccacactcagaacgtagagctgggtggttgctactacttgtagaagaggcaactctctacttgatgatattatctgttgtttcctgttgtgcagtatctggatagactgaggcaggaacagccacagggtgtccacaattctttgcacccatgcccttgggttgtcctcttccacactcccatgactcggatcttgcccacattactcactttgttcaatgggaccataacaaatggaaacacaagcagaagtttaaaaagggcttgcatgtggtggcttgtcttctctggctgcagagagccctgagaccaccttgtaagcaaacctgctggaggccatgcagggaggaactgaagtactctggccaacaacctagtgtgaccccaggtggtgagcccattctacattatccagctccagttcagccaccaactgacttacaacttccttaatgagcccaagtgagaccagcagaagaactaccaagctgagcccaacccaaattgcactattacatgattgttgttttaagccactaaatttgaggtgtttcgttattaaaaaaaaaaaaaaaaggttaactataacataaccacaacgtcactcagcattcagacatcttaactcttgaattaaaaagttatttaagtctgtgactcctgctttaggatatcaaagactctttccacatacacatagtttctatgcacacacacacacacacacacacacacacacacaaacatttgattattaaataagagcagggaatttaaattgttcactctttcccccaggacagcacctggcacacagttggcacttaataaatatcttttgaatgaataaatgaattcacagatgtttcacaaagtaatttaagaagtagcctagaggtggtcgccacccccaggacttaaacactagaagaatctccaagaaaatctccaggtggtgttgagcatcactaaacacccattccagtctggcacactggctttccagacaccccactgtatctgctaaactagttttggaaagtcagcacatgcgagccaactcaaaggggactaaggtttgacaagactggtaataacaacctatttgtcatttgtgcttagctttccactggtgttgacagaggtctcaatggcaaagagactgtgctacgaaggctgaaggaaatatgatgtggctgtgcatgttggctgaagaacagccaaaatgagagctagatcccatttacctactgagtgaattgtgactgttatgtttcaagggattaaaaaaggaatgccatgtgaaggaaaacactagatactccaaacaccctgaaatgaacacatatcaatcttgtttcactgtaagaaatattcagcgaagtgcctcccatcttttaccattttcctgttcattctctttcctttcttaaaatcaagggaatgttcattaaattaatcaaagacaccattctggggagttgcacagcaacctggaaaccataacaattggagaagtgggaagcaacttggaattgcaaaattggaagtcctatattttagtacaatcatctgcttcttggtgactttgtggctgaggcagccagtctgtctaaactctagctcatctctaagatgagctgggtggggtggctcctgcctgttatcctagcactttgggaggccgaggtgggtggattgcctgagctcaggagttcaagaccagcctaggcaacacggtgaaaccccatctctactaaaatacagaaaactagtcgggcgtggtgacgtgcgcctgtgatcccagcaactcaggaggctgagacaggggaatcgcttgaacctgggaggtggagtttgcagtgagccacgacagcgccattgcactccagcctgggtgacagagtgagactctgtctcaaaaacaataaaaaataaaaaaggttaaaaataatatctgctctgcttactttatagcatttttgagaaaattaaaagacatgacataagtgaaaatgtcattcaaatgttagtgaccatagaataaagtagtaatggccaataggaacaaatacaggaaatgaaataaaattcattcaaggccctccgacaatggctgtatggcagacagcaggagaaccaacaccaaactatcaaggtaggaagcggagaagaataaggatcagattaacagagtggaatccgaaacagaaagatgtggatctggctggtgtgttaaacagggatgggacagccatgctggggatctgctgcagaagacactgggtatcgagtgggcagctgccgttcttgcctgcccagtatccatttctctttcttgccttttcttttaggattgcttcattccttcatcccacgtgccacacctatagcctgagcaagatcttcccctgtgaccggacctattccaatcagattatctttcctggggatggaaatttttattggggtgacacaagaatggaaaatgtttgcagtgaatatattccttagaagcatcctaaagagaccattcatgagtcctgctactgaaatctccatggctgccttctttgcagtcctttcagaggcctcatttgttaaactagtcagccgttctttgatttcatgagccacttagaatccctccaatatcttcttttcttccatctcactttatttatttatttatttttggttaagttaaccagagtcttctgctgcttataactaaacaaacaaatgcaaataatgaaggaactcacttaagttctagattcacagcactggggcaactgatttacacaccttattgctcctggtagtgttgaccttctccttgtcctaacctgcttgcttctatgaattttctgacaccaactgggcaaattggtgaatctctaaacagggagatatgggaaagataggtgtgtatgggaaacccaaggctgccttagagtagcagcttaaagcaaagttgcttctggaatacaagaacagaaatggcaatgagcaaagcctctccctcatatctggtaagatcaggtcatcattagaacatcgtggctaattttactttccacaacctttcaagtgtctgaggaaagccacggtggaggcagcacagaaaggaccaagatcatagcctgactgggcttaaagccactggtatgctgtgtgaccttggaaaattgcttaacttctctcttcctcttttaccccttctgtaaaacagagatgcctatgtcataggtgcctatctcatagtgttgttatgagggtcaaatagtttggtatttgcaaatgctcctagaatcatgcttggcacatagcaagagctatataagagtatattaaaacaaattgtaagcatttcccataagaaagggttgggaagctgagatggcttagcctggagagaaaatgtcttttttaaaaaaataaacaacaacaaaatctcttcgtaaccaatatgaactttgccgcgctaaccacatgccctttgatactgaaaagatgatcaaaggaaatcagcaaacagggctcttgtgtcatggcttttggtatcagttgtaacaattgacattttttttaattttttctgagaagaggaggataagggtcccccagagagtaatgaggcattggtcctggggtccatgtaatgacaagtaattgtaacacagacagggaggatggttccgccgccttggtttggggtcccagtatgttggcaatatttttgtgttacttcaaagagtcaggcaaacataggggcctccatccttctgactcattgccatttgctatggtttgaataattttgtcccctccaaaaattcacgttgaagctcaattcccaatgcaacagtattgggaggtgtggctttcgagaggtgattgagtcatgaggtctccactctcaggaatgtcattatgtgcccttataaaagggctttatgagggagtttctcccttttgccccaacccttttttcatgtggagacacagtgttactcccctctggaggatgcagtattcaaggtaccatcttggaagcagagggcagccctccctagcacccaaacctgccagcactttgatcttggacttcctggcctccagaactgtgagaaataaatttctgttctttataaattacccagtctgtggtattttattatagcaacacaaacagactaagacacctctcagccactgacctcctgcttcactcaatggtggaatgcccttttcccttcccctcagtgatgggcacacagttggcaagtgtgaggtgtaggcagctgccatcctcctgcaccactgctagggaaatctctctggcttagggttgacaccccctttcccaagaagcaccatgttccaaacatcacccaagggtggtgatatggtttggctctatgtccccacccaaatcccatctcaaattgtaatccccatgtgtcgagggaggggcctggtgggaggtgattggattacaggggtggtttcccccatgctgttatcatggtagtgagggagttctcacgagatctggttgtttgataagtttctggcatttaccctgcttgctctctctctctctctctctctttcctgccaccctgtgaagaaggtagctgcttctccttcattttccaccctgattgcaagtttcctgaggcctcagcagccatgcagaactgtgagtcaattaaacctcttttgtttataaactacccagtctcaggtagtatctttatagcagtgtaaaaaaaaagactaatatggtgaaaatccctgccaattcagattctctgggtttttttttttttttgtcatattccggccctctgcccacagaaaatagactgtagcacaagggcaagaaaaaggaataaaacagggaaatatccatggtaatctgagagaggacaagtgaattactagagctagaattgctcttggcatcagctccaatttaattgttcctatttagctagaagtatttgtgattcaggctgtcagcagttacttcttgtttctctatctgatggtgatcagatccctgaactattagttgaaagatgcttgggcagagaaactttctctccactgacttagatgctacagaatctgatggtagtaggaccaccagggggtttccatgactccccatttgtcaacactgtgtctccagaattttccagatcccagcacttggtaggatcaccagccatggccttgcacaccagtttgtcttcaattttccccatattcccctctcaaaacgttttccatatgctttccatccctggccgatgcatatactcattctctgatagggttactgtaagaccttcatagaccctaagcctttggaggcctcaccccacatcaaagcagacatcctaaaactacatccacacccatcaccaaatataacttccatataacaataggtgagttgagttgcagttgactagttgattgcaattacttttttgtagatacttaattaacattttaattgtaattttgtagcattctttttatattttggacttttttcacaaatgaaacactttcactggcctttgaaaatctcatatgccctagatattgttgcctgtagtggataaagtggtcttgtctttcaaccaagggaagtggccagaaagccatccaaagctctgaagtttgggaaactaaagagtgcatttggaaatggtaaagtcaagcttactattggattgtgctgacctaagataagttaaactgtaatgggggaaaaaaaggctgatgaggttaaggtcacagatcagattttattagcatcatcatagattattataattaatcataattgtcaccttttattgaatatttatggttattggatgctttgtatatatttgtatatacatatataaaatatttgaagtagtgtttgaatagcaagggttccaactcctactcctttctctttttaggaaaaaatgaggcattaaccaccatattattattttagttttatgtaaaagaacaatgagagatgctcaacccagattatggctgtcaggattagaagactttctacctaacccagcagaagtgtgacaaaccagggtagcaaggggcagggggggtggtaattgtgtctcttatcttggggtctgtgtccgttttgagacttgttattacatttgttgttgagaggataggatcctactggaaattataggcagggcagaatgtccttctgagacagaatttctttgcagacattataaactgcaccaatatgcatcctcaaacataatttatatgtaattatgtaataaatgagttgagttgtagttgactagttgacatattattcttttttatatatgtaattaaatatatttaattgtagctgttagttcctctagtcagaggacaggtgcatagcttagagtagaaggaactagctctgtatttttgtagtgcagaggcctagacttggcaacttcacacttcatctcagaagcagcaagtggcggagtcccctttcctaccggggtggatgtatgctccactggggagtgaggattctggtcttcgttcccagcagacagcttcggtttaccacctaaagtggtaatggcttaggctagtaagagggattatgctcttagtttttctaccctgagatttaaaaagctaaagtcaaagaaaaaagaaggcagctgcccaaagtcatccaagtgaaaatgatgatgaagaggaggagcaaaaatgccatttttaccaactttgctaatgtgaggaaactgatgtgcaaatactattcctaatcctcataaccaacctatgaagtacatgttatcactcttctatggttgagaaaactgagtctcagaaaaattgattgatttgatcctagtcacacagacaaagtttctagtggttgagatcagacttgaactcatatctatttaattccaaagtcttcaggcctcccattttggaatattttttctccccaccctgttcccctgcctttataataataagcaagatagctaagccaatctgattgtgcagcagccagtctctcttccatggagctccagactacattatccctatgttccttactagttagtgcagcattttttataagcttctgtttttgttgactctgaatgtcatggtagttactcaaggctgatataaggcagctcttgttggtttaattgttgggagccttgaagtaccttccattcctctccaaccccatgtgccatggcctccaaattgaagattgggctgctccaactcctacttaacgtctttccagcatggaccgctccatttctgagccagggaaggctatgtttgtaaacacacttttgccctctaactgcctctatctttccctgtctgatcaggccaagctatggccacagttgtgtataattagctaacttcactcactgtctcctatgtttatgcttccctgcccaattccaagtgacaaatagctatccaaagccatgggcttgaccccagatgacctcatgcttgagtgccttcatcccagtgcatgggtcagcactcagagactgccatagcccttgctcagctggtaattgatttccatgtgaattcatgggccagttggtggaactgaggcattgggtgcattgattaataacataggcatgggggaagcctatggtagccaccattttggagcatgtccatcagaatattcatttcaaataaagtcttgtatttaagcaaccttgtctacccagtgccaggaaggtgtaatgacctctgtaaaggattcctaccccaaggctcccagacttccgacaacaggaattcaatgagtaattctcaagccacagtttccccaataaccattttcttttcaaccatttgtttagtttctgtgctggctgatgccaatcagttatcaacaaatgaggaatagtgtctaggtcacacttctgttttccatctagtgatctgtttatttatgcatcattaataccttcactttaagagttgttaatacatcaaaacaatgtttgttcaagctcagtgaagtgctgtgaagagggaaggatcccagataagaagtttgaagtcctgcttttcactggttgtgtatgtctgcaattatctcacctatctggccttggttccttcatttgtgaaaaaaaaaaaaaagaagaagaagaagaaagaggaagacacaaaagaaagaaagagagaggaagaaaggagagagggacagaaggaataaaaagagagaaaaagaggttagactggataaactattcctaaattcccctccagctccttgttttacgtattttgaagctatattattaggcaaataaaccctgataattgttatgtccttttgatgaagtgactccactatcattatgaaatgacttcctttatcattaggaatattctttgctgtgaaatctactgccagttggtgcaacgattccagctttcttttgactcatgttagcatggtatatcttttcaacttttactttgaacctatttgtaccttatatttaaactgcattttttgtagggagtgtatagttgggtcttgctttttccccctctgccttttaattggactacttaaaccatttaagccattaacatttaatgtgattgttgatatggttaaatttaactctatcatcttactacatagtttccatttttactatctgctctttgttttctttttgccccttttttacttcttttaaattgggtcaatgttatatttttagctataactccttgttttagctataactccttgttgtgttattgtaatcattgcattagtggttacagtgaatgtctttaacttactgggggaggagccaagatggctgaataggaacagctccagtctacagctcccagcgtgagcgaggcagaagacgggtgatttctgcatttccatctgaggtacagggttcttctcactagggagtgccagacagtgggcgcaggtcagtgggtgtgcgcaccgtgcgcaagccaaagcagggcaaggcattgcctcacttgggaagcgcaaggggtcagggagttccctttccgggtcaaacaaaggggtgacggacagcacctggaaaatcgggtcacttccaccagaatactgcgcttttccgacgggcttaaaaaacggcgcaccacgagattatatcccacacctggctcagagggtgctatgcccacggagtctcactgattgctagcacagcagtctgagatcaaactgcaaggcagcagcgaggctgggggaggggcgcccaccattgcccaggcttgattaggtaaacaaagcagccaggaagctcgaactgggtggagcccaccacagctcaaggaggcctgcctgcctctgtaggctccacctctgggggcagggcaaagacaaaaaaaagacagcagtaacctctgcagacttaaatgtccctgtctgacagctttgaagagagcagtggttctcccagcacgcagctggagatctcagaatgggcagactgcctcctcaagtgggttcctgacccctgacccccgagcagccgaactgggaggcaccccccagcaggggcacactgacacctcacacggcagggtattccaacagacctgcagctgagggtcctgtctgttagaaggaaaactaacaaacagaaaggacatccacaccaaaaacccatctgtacatcaccatcatcaaagaccaaaagtagataaaaccacaaagatggggaaaaaacagaacagaaaaactggaaactctaaaaagcagagtgcctctcctcctccaaaggaatgcagttcctcaccagcaatggaacaaagctggatggagaatgactttgacgagctgagagaagaaggcttcagatgatcaaattactctgagctacgggaggacattcaaaccaaaggcaaagaagttgaaaactttgaaaaaatttagaagaatgtataactagaataaccaatacagagaagtgtttaaaggagctgatggagctgaaaaccaaggctcgagaactatgtgaagaatgcagaagcctcaggagccgatgcgatcaactggaagaaagggtatcagtgatggaagatgaaatgaatgaaatgaagcgagaagggaagtttagagaaaaaagaataaaaagaaatgagcaaagcctccaagaaatatgggactatgtgaaaagaccaaatctacgtctggttggtgtacctgaaagtgacggggagaatggaaccaagttggaaaacacgctgcaggatattatccaggagaacttccccaatctagcaaggcaggtcaacgttcagattcaggaaatacagagaacggcacaaagatactcctcgagaagagcaactccaagacacataactgtcagattcaccaaagttgaaatgaaggaaaaaatgttaaggggagccagagagaaaggtcgggttaccctcaaagggaagcccatcagactaacagcggatctctcggcagaaactccacaagccagaagagagtgggggccaatattcaacattcttaaagaaaagaattttcaacccagaatttcacttccagccaaactaagcttcataagcgaaggagaaataaaatactttacagacaagcaaatgctgagagattttgtcaccaccaggcctgccctaaaagagctcctgaaggaagcactaaatatggaaaggaacaaccggtaccagccgctgcaaaatcatgccaaaatgtaaagaccatcaagactaggaagaaactgcatcaactaacgagcaaaatcaccagctaacatcataatgacaggatcaaattcacacataacaatattaacgttaaatgtaaatggactaaatgctccaattaaaagacacagactcgcaaattagataaagagtcaagacccatcagtgtgctatattcaggaaacccatctcacgtgcagagacacacataggctcaaaataaaaggatggaggaagatctaccaagcaaatggaaaacaaaaaaaggcaggggttgcaatcctagtctcagataaaacagactttaaaccaacaaagatcaaaagagacaaagaaggccactacataatggtaaagggatcaattcaacaagaagagctaactatcctaaatatatatgcacccaatacaggagcaccaagattcataaagcaagtcctgagtgacctacaaagagacttagactcccacacattaataatgggagattttaacaccccactgtcaacattagacagatcaacgagacagaaagtcaacaaggatacccaggaattgaactcagctctgcaccaagcggacctaatagacatctacagaactctccaccccaaatcaacagaatatacatttttttcagcaccacaccacacctattccaaaattgaccacatactgggaagtaaagctctcctcagcaaatataaaagaacagaaattataacaaactatctctcagaccacagtgcaatcaaactagaactaaggattaggaatctcactcaaaactgctcaactacatggaaactgaacaacctgctcctgaatgactactaggtacataacgaaatgaaagcagaaataaagatgttctttgaaaccgacgagaacaaagacacaacataccagaatctctgggacacattcaaagcagtgtgtagagggaaatttatagcactaaatgcccacaagagaaagcaggaaagatccaaaattgacaccctaacatcacaattaaaagaactagaaaagcaagagcaacacattcaaaagctagcagaaggcaagaaataactaaaatcagagcagaactgaaggaaatagagacacaaaaaaccttcaaaaaattaatgaatccaggagctggttttttgaaaggatcaacaaaattgatagaccgctagcaagactaataaagaaaaaaagaagaatcaaatagacgcaataaaaaatgataaaggggatatcaccaccaatcccacagaaacacaaactaccatcagagaatactacaaacacctctatgcaaataaactagaaaatctagaagaaatggataaattcctcgacacatacactctcccaagactaaaccaggaagaagttcaatctctgaatagaccaataacaggctctgaaattgtggcaataatcaatagcttaccaaccaaaaagagtccaggaccagatggattcacagccgaattctaccagaggtacaaggaggaactggtaccattccttctgaaactattccaatcaatagaaaagagggaatcctccctaactcattttatgaggccagcatcattctgataccaaagccaggcagagacacaacaaaaaaagagaattttagaccaatatccttgatgaacattgatgcaaaaattctcaataaaatactggcaaaacgaatccagcagcacatcaaaaagcttatccaccatgatcaagtgggcttcatccctgggatgaaaggctggttcaatatacgaaaatcaataaatgtaatccagcatataaacagaaccaaagacaaaaaccacatgattatctcaatagatgcagaaaaagcctttgacaaaattcaacaacccttcatgctaaaaactctcaataaattaggtattgatgggtgtatttcaaaataataagagctatctatgacaaacccacagccaatatcatactgaatgggcaaaaactggaagcattccctttgaaaactggcacaagacagggatgcgctctctcaccattcctattcaacatagttttggaagttctggccagggcaattaggcaggagaaggaaataaagggtattcaattaggaaaagaggaagtcaaattgtccctgtttgcagacgacatgattgtatatctagaaaaccccattgtctcagcccaaaatctccttaagctgataagcaacttcagcaaagtctcaggatacaaaatcaaggtgcaaaaatcacaagcattcttatacatcaacaacagacaaacagagagccaaatcatgagtgaactcccattcacaattgcttcaaagagaataaaatacctaggaatccaacttacaagggacgtgaaggacctcttcaaggagaactacaaaccactgctcaatgaaataaaagaggatacaaacaaatggaagaacattccatgctcattggtaggaagaatcaatatgaaaatggccatactgcccaaggtaatttatagattcaatgccatccccatcaagctaccaatgactttcttcacagaattggaaaaaactactttaaagttcatatggaaccaaaaaagagcccgcatcgccaagtcattcctaagccaaaagaacaaagctggaggcatcacactacctgacttcaaactatactacaagtctacagtaaccaaaacagcatggtactggtaccaaaacagagttatagatcaatctaatagaacagagccctcagaaataacaccgcatatctacaactatctgatctttgacaaacctgagaaaaaaaagcaatggggaaatgattccctatttaataaatggtgctgggaaaactggctagccatatgtagaaagctgaaactggatcccttccttacatcttatacaaaaatcaattcaagatggattaaagacttaaacattagacctaaaaccataaaaaccctagaagaaaacctaggcattactattcaggacataggcatgggcaaggacttcatggctaaaacaccaaaagcaatggcaacaaaagccaaaattgacaaatgggatctaattaaactaaagagcttctgcacagcaaaagaaactaccatcagagtgaacaggcaacctacaaaatgggagaaaattttcgcaacctactcatctgacaaagggctaatatccagaatctacaatgaactcaaacaaatttacaagaaaaaaacaaacagccccatcaaaaagtgggcgaaggacatgaacagacacttctcaaaagaagacatttatgcagccaaaaaacacatgaaaaaatgctcatcatcactgaccatcagagaaatgcaaatcaaaaccacagtgagacagcatctcacaccagttagaatggcaatcattaaaaagtcaggaaacaacaggtgctggagaggatgtggagaaataagaacacttttacactgttggtgggactgtaaactagttcaaccattgtggaagtcagtgtggcgattcctcagggatctagaactagaaataccatttgacccagccatcccattactgggtatatacccaaaggactataaatcatgctgctataaacacacatgctcacatatgtttattgcggcattattcacgatagcaaagacttggaaccaacccaaatgtccaacaatgatagactggattaagaaaatgtggcacatatacaccatggaatactatgcagccataaaaaatgatgagttcatgtcctttgtagggacatggatgaaattggaaatcatcattctcagtaaactatcgcaagaacaaaaaaccaaacaccgcatattctcactcataggtgggaattgaacagtgagatcacatggacacaggaaggggaatatcacactctggggactgttgtggggtggggggaggggggagggatagcattgggagatatacctaatgctagatgacgagttagtgggtgcagcgcaccagcatggcacatgtatacatatgtaactaacctgcgcaatgtgcacatgtaccctaaaacttaaagtataataaaaaaaaaagatttatataaaaagacaaaacttaaaaaaataaaaacttactatagtatactttcaagtgatattactccacttcatatagagtgtaaaaaccttgcaatagtatacatccatttgtttcgtcctaacttttatgcttttatactaaattttatgctgtcatgcagtatgcttttaattaggttataactctcatctacattactattattttttgaacaattgtcttttaaagaaatttaagcaagacaaaatttctatatttacccacatagttatcatttcccatgttcttctttctttatatatatcctttttccagctggtcccatcttccttccgcctgaaggacttcctgtaatatttcttgtagtgcaggtctgcagctgatgaattctttcagcttttataattcttaaatagtctatattctacctttgtttttgttttttgttttgctggatatagaattctggtttagcaggattttttttacttcttcttttctttcttaatttaaagctgctgctggtccactatcttctcacttgcatttttttctgaaaggacagctgctgtcattctttgttcctcagtacataacgtttcctttttctctggctgctttggtatttcctgtttaacattggttttgaatattttgattataatgtctctgtatagttttctttacgttttttgtgcttaggttccattgatcttagatgtatcagtttatagttttcatctaatttggaaattttcagacattatttctttaaatatcttttttcgtcacccttctttttagggggatttcacttacacacatatttagccacttgaagttttctgatagctcattgatgcttatttccattttttacttttttttttatctttcagtgtttcattttggttagtttttattgctatgtctccaagtttacaaatattttcttctggaacatccaatctattaatgtgatggggacgcttcttcacaaaaatgacaaccaccaaatgcagaaggaatgatagaattagaaaatcactgattatcgactctcaactgattaatggactcaggcaaggatgaacaatagatgctaaaatatcgggtgaaaacagttctgtaaatatttatctactcatcaagacaagataaattacactcaacatatatcatttttagaatctgaaaagtatgtattactttaggaagattgctatcaaaatgattttaaaagtagggagcagagagcagtgaagctctggtacagagatcaaccatagagagttctaggcgtttggaaaagtcattacatggaacgtaattccctgaccctgccagtaaataataataataattaaattttgtgtgtccaactgccccctgaaagtctgtggataatggcttccaagggtgtcaagagagaaggtacaggtgactggtagctgaaagtcacctgaaatatactgtgttgggcaaggacagcatctgcaataagtgtccctcaaacaattcatcgcagatttgtttctattgttatttgattaatggctgaattccccaactagactgtaagtacaaggaaaggacctggtctttttttgtacgccagcatttaacagggtaactggcacacagaaggaacttgataactacttctcaaatgaatgagtgagtgagtgaatgagtacataaatgaatgaagacagcactgtggctcatgcctgtaatcccaccactttgggatgccaaagtggaaggatcatttgaggctgggagttcaagaccagcctgggcaacataatgagaccctatcactacaaaaaataagaaaatcagccaggtgtggtggtgcatgcctgtagtcccagctactagagagtctgaggtgagaggattgttggagcccaggagtttgaggctgcactgagctatgattgtgccactgcactccaacctgagcagcagagcaagaccctctcgaggaagaagaagaagaagaagaagaagaagaagaagaagaagaagaagaagaagaagaagaagaagaaggaggaggaggaggaggaggaggaggaggaggaggaggaggaggaggaggaggaggaggaggaggaggagatactttacagtcactttttttaatggaactgtcctgtgttaacactagctatgaggtgtactaacttctaagtgccctgaagcagaaacgtagcctgttcccttcactattttaatcctaacaccaagagtgcctggcatatagtaggcattcaataaatatttgctgaacccataaattagaatagcggtctccaccagacttcatgagggcaaaggcaatctttgtaatagctctggtatcaagcacagagccctgcacatagtaatggttcaataaacaaggagcaaattaatgactgatgagtacatgaatcgcatctacacttccttattaaactgagtgaaggctgcaaatgttccaaagagaagcacctcagagaagtccacagggctctagcagaatgtgcacaggaggccaggttggtaggaggctggcctgcctggtgaggcctcgccttctatggtccccacctccctggagccctggagctggactcattctgactttgccaggaaagggctagctatgaactctgacttccccctccagagagtgtccatgtcaatgttttcctgttcagtggccaggctggcttagccctgggccaaaaggctccctgaggagggctctctggagtctggactggcagtgggtgttgcctccactgagcctgagaggaaatggtccagaagaagtaggaccatcatccagaaagagacgtcaacaattcagtattatttttggagctctgaacctgaaagtagaagttttgttaaagcaccaaccaaattttaaaaaataaaattaagcaaataaaataaagcagagaaagctagactaaccttcctgctaataaactcagaatttaagagagtattgcactctgaaaccaggacttttctcagagactcatggagctgtattgttcatatggtctgtgatttgtttctgacctcttagtatacctgccacgtatgcctcaaatcctatgacagcaggtgccaccaagacaaagctttctctatacaggacaaagctccagacaaaggctcattcattcatgctacagtgtaggaaactgcattccagtatgttgaaagcatccactacctcccggattttgtagcacatccagtgctacaaattgatccaaactcttaaattcaaatcttccaaaagaaaaaaggaaaggaaaagcagctcacccccacctggtagagccctgacaggctaaggaaaactccaatttgattcagattggatcagagtcaattactagccatgtgaagagaggagcttctcctacttcatcaggtccctgaaaagaaaataattgctttagctccttgctactcaacctgtggatcctgaatcaacagcatcacatcatctgggaactttcagaactaaaaatccttatgaccttggtttaggcaagatttcttggatatgacaccaaaagtaaaaacaacaaaaggaaaaaaatacataaattggacatcatcaagtttgtgcttcaaagcacactgtcaagaaagagaacagacatcccacaaatgggagaaaatattttcaaattaaatatctgaccatgatctagtatccaggatatccaaggagcacttacaactcagtaataaaaagacaaaaaaaaagattttaaaatgagcaagggatttgaatagacatttctctaaagaagataggcaaatggccaataatcacatgaaaagatgctcaacatcctaatcattagggaaatccaagtcaaaaccatacccacttcacatccacttggatggctgtaataaaaaaatcagacaattcatgctacaacacagataaaccttgaagacgttatgcttagtgaaagaagccagacacagaaggccctatattatatgattccatttgtaggaaatgttcagaataggcaaatccatagagacagtagggaaagtagatttggggttgccaggggctgtgaggagagaaaaacagggagtactttcaataagtatgagatttctcgggtaatgaagatcgtctagatggtggtgatggggtcacaaccttgtaaatatactaaaagtcactgaatcttatactttaaaaggttgaattttatgataggtgaattatatcacaataaacaatgaagaaaaagaaaaaagatctcaggccccaccccagacccctctatcaacatctgtgttataacaagatcctcagatcacagaagtgcacattaaagtctgaggagcaccaatgtgacactggttggcatacgtggctgcaaattggaatcacttgaggagttttcacagccactccctgatgtgctgagctgtctttctgtgtctcatctgctcaactcacctggaagctcctggggtgtctaggatgggcctcatacttcatgatggttaccagcccttgcaaggccccttttggtgctcaaaaacacatattgcttgaattaagagcaggaactctgggccagactgtctcattcaacttgtagcagtgccactgactagctatgagaaattggacaaatcacttaatatctcatgcctcagtttattggggataataatacctacttcatagggttgcagaagggaataaactacttaatatatataaagtacttagaataacacctggcctgcggtaagcattatatatatgtattagatattattattatatatgcaaatattgtttcttaataatattctgtccaggcgcaatggctcatgtccataatcccaatgctttgggaggctgaggcaggcagatcacttgaagccaggagttaaagaccagtctagttaacatggtgaaaccccatctctactaaaaatataaattagcctggtgtggtggcacacgcctgtaaccccagctgctcaggaagctgaggcacaagaatcacttgaagctggaaggcggaggttgcagatcccgccactgcactccagccaggttgacagagtgagactgtctctgtctcaaataataataataataatattcttatatactccactattatacattatatattattatgttaatagtagcaactattgaactctgaccatgtaccaggcactgagctggtgtttcatattattttatgtaatttttgcaatcattctatgagatgggaattcattcagcaaatatttagtaaggacctgtcaacaatgtacctgacccagatgagaaattgaagtccagggaaggtaagggacctacccacagtcacagagctaatggcaaaggctccagtctgactacagaatctaggctcttgccctcaccttccgtggtctttcttcaaaagggtgcaaactggcaggagaaatgcaaaagcaagatgccagttgggtccaggtgtgtggtgggggagtccaggaattccaagcaagggcatttggagtggcccttgggatcaaggcatttggtcaccttagaggtggatgtgtgggcagcccctgcccagtggaggttgggtgccaggggatggagggcagagggtcactgtgattgcgctgggctttcaggacccttaatccctgctacagcaggaaacactcctgggaacacaaaggcatctctctcctggagccccagcagccacccaggctgggaagcttcacctctcaaacaggacagcagcagcccagtggccaggctcagctgacagattcactcatacaaaacttatcactcggtcatttaaccccttagcctccaaagcagaaatccacaaatcccctgcacttattgacctgtctcttttcttagcaactttatgctctaaagctgctgaatgcagaagacagaaattgaagcagatctccaaatgaccatcaagagttgtgcaatcacaccatgtcccatgtccacataaggcccccaccctcaactccaaattgcctcaaactgtcagaagttctctacctccacctctaaaggcctgaaaaagaaagtcccttatgggctctaactctttccattattcaaacacaaacgatgtttaaataagcattgttattgtatattcggatttcaaagtgggcttttccccatccagatgttattgcttacatgactgtctacatccagagaaacactgctgaggacgccgcctctgagacactgttctataactcaccacttggctgttctctttccaaaaaaaaagactgtttttgatgtaaaacactagttgatttcagaatgtggctttctccctgctaaactttctcctcacttaccctacccaacaagaagtctctctcctaatggaattgctggaaccacttaccctccattaagacgctaacctatttcagagaggagggaagaaaaagagatatctaagtgagtaaattgactcagacggaatgaaagattgtggagacattcccgttttgtgagtgttttttggggttagggaatggtaggcagggaggagagagggggattagacccccagaatcatattttgaccctgttctcccaaagcaaggaataattaggctagctgcttagtgaaattagaatcacatttggttttaatttaatctttactttcacacttggatggatgccaagattgaaagtcactgtaacatgaatccacattttttttaagttttaagttttgatatgattaagtccattttagacttttataaaaattaaaagttttaagtgaagtgcaaatgatctcaccacctcaatatagcaactcatctgatgtccttgcttctgtgtgtgtatgtgtttaagcatattacctaaatatgggtatctggtctgattctggaacagagttgggcctagatgattctacaagggatggagaggtggagagtggggtgggggacactgatagcagatgccaaggagttcagtcttgtattaagggaggcggtgtggtggaaatattgtggattttggagtcaaaagacctggctcctagcctgactcaatcatttaccaacctgactttatcatttggataagtcaagtaactactgtaaacttaggccttctcttctctcaaggggacaaaagacaactaatttgcagagagggttagtggtaatgtgtaaaaagcatattagctattattataacatataattttcccatagttagcgttcaattgaactatgtagccaatttgctgtctttcttgtgtcacctagctgtattgttaaatgtacactgcaccattttccgtcaatttttgtgcctttgagtagcattctggtatctcagatcaagaggctaaaataaattttatttctaaaagtagtaggaagcacattctttgccctgacagggagcagctgcatagaagaatgagagcaacagcaatgacatttctttccacatagttaagcactttccctgccttagagcagagtttctcagcttcggcgctaatggcacattagaccagttaattctgttgtgtggggttgtcctgtgctttgtgggatctgtagcagcatccctggcctttccccactggatgccggttgcagcctctctatcctaacccgctcacattgggacaccaaaaatgtctccagacattgccaaatgtcttctggcaggtaaaatcaacccctaatgacaacaactgcctaatagcatttaaccctcacagcaaacaaataaggttggaataagcattattcccatttacaaaagaggagactgagggtgcaagcaggtacgtgacataatggaataggactcagacccgcctatgatcgttccacctacaaagggctctgagaactgaagagttactggaccatctcccgtttcatctatagagccctgagcagaggcaaggagggcaagttggctgcttccagagaaaggtgtagctgcttccaagatcactgccttcccatgttcagcagtggaaccggactctttcgagctggcatggggcagccaggaatgagagggacagaccaagagagtggtgctcctaaccctagagaagaaaagactccaaggagagagttaccaactgtgtcggctgctgctaatcacctgcaagaggtcagctcagcaggggaaagccggccggtggggaggtcctagaggaccctgaagagagttggtcaagtggcttaaactagtaatttacactaatgtattatgaaatccatgttatatgctattattttttagattaaaaattgcatatgagggccatgtttacactattaaatgcatttctaattaaaaatatgatagcatcttatgaggactgttctacaaagaggatcatgggcttcaggccctcctcttttggaacaagtttgaaagcctcagaactgtgacttagttgatgaagaagatcgatagttgcctgagggaaggggctcagatgaaatggtctctcctttccacgcaaaaaggggcacagccatcactatcaaatcttcagaaccaaaaatcaggatgcgaagtcctaatgtaaaccaatgtccataagtgatccaccagaacagaagattgaaaaccagaactgccctggaaaattcaaaatgtgagagggctgaggcccacatttcataaatgaaggggcaggattgttaactcgggcccattataaaatactatgtgatggtaaaatgcttgtttctgcctttctaaatcgtgaggcaacttcctttctgatcgcatgaataaacttgaaactgcaactgtatgagctttgtgatacaaactttcccttgcaataaatgatattataaagtgggtttaggatagaaattcagaagaaaaacccttgaccttgggtctgctgcagaatgctatcaggagcagagttcatccacagtaacactgtcgccattacagttagtaatttcacagggtcctaaatgattccctgggagtatttcactgcctttgctattttgtcccaaaattttgactctgaaaatttcgttcactcaaaagcctggaaagtaatgttctgtctggggaaagaaggacatttaaaatgtttatctgttgctaacacttcaccaactcttccagttggaatagcttaaagtaaacaacactagggagcctgtccctcagaatcttcctgtcttctctccatcatcacccctccttccccattttgtttccagcattttcagagtggtatacagtttacgacatgcgttggcattcagggtttcctgcaggtcaggagacctaggccacctccttcggctaaggctgccggtatcctcaaagtgaagcagggaaaggccaaaagaaggttacaaaaattacgatacagttaaaacatttggccgggtgtggtggctcacacctgtaatcccaacattttgggttcacttgaggtcaggagttcaagaccagcctggccaacatggtgaaaccccatctctactaaaaatacaaaaataagctgggaatggtggtacacacctgtactgccagtccctcaggaggttcagggaggagaatgacttgaacccaggaggtggaggttgcagtgagccaagattgcaccactgcactccagccagggcaacagagtaagactccatctcaaaaagtatatatacttaacaaattattacctttaacatacatatactaatgcaatacaatgcaattatattacatagatattatatgaacatgcttgtgtgtgtataattttttaaaatttaaatttgagacaatttgtgaatatgaggtcaaaagacctccttctctctccccaactactcttgtaccaccttaccttactcacatctatagaacttggcttttcacaacaactctgcatgcataaaaataatgtatagaattagtatattttcacttgataaagaaggaaaccaaggcctagaaggttgtatgaattgcctaagatcacaaagctgagtgctgagcaagtgaatcaaacttaacctttgtattacaaattcagagttctttccactatggggccttgtcttagtccattttgtgctgctataacagaatatcatggactgggtaacttacagagaaaattttacagttctagaggcaggaaagttcaaggttaaggggatgcatctgatgagagtcttcatgctgcatcataccgtggtggaaggcagaagttgagagaggaccagaaaaagagagggagagagccgaccttatctttttatcaggaacccactcccacaacaactaatccactccattaatccattcatgagagcagagccctgatgacctaatcacctcttgaaggtcctacctgtcagcactgttgcactggggattaagttcccaacatatgaactttggtgaacacatcaaaaccgtatcagacctcatgtcacctcttccaaaatgctttccccaaataatgagaattaactatgatcctcatggtcagaaagatgcacacacccactagtccgtaatttaaaagtaaacatgtgctaaactgcatggtactcggggaaaatcaaacagggttggggggtggagaacagacttaatttcaaccccagaaccctcaaggtaagtaaccccatttctattctacacttcataaactctatactatagaggatagggtctcccaggtaatccgagctctgtaagaattcattggctgggcacggtggctcatgcctataatcccagcactttgggagaccaaggcaggtggatcatgaggtcaggagttcgagaccagcgtgaccaacatggtgaaaccctgtctctactaaaaatacaaaaattagctgggcatggtggcatgcacctgtaatcccagctactccagagattgaggcaggagaatcgcttgaacccaggacgcaggggttgcagtgagccgagatagtgccactgcactccagcctgggtgacagagcaagactccatctcaaaaaaaattttaaaaaggatttatttatccagctaatatttatagtgctgatggtacgttaagtgctggacaacaggctggagatctaaaagcaactcaggaatcctctctggcctaaaggtactcctggctcaaagtagagacaaagcagaagacagcaagtactatcaagacacattgagccattgggtagcaatttaaaggcaaggccagcaataaaataagattaagtgtccaacaataagaaactgtttaaaaataaaatcatccataagagggaattctatgtacatatttgtagaatgccatgtctttattttaaaatatgaaccaacatatttttaaacatagcacaggttgaaaatggtatatagaatatgctgtctatgtagatctataacacagataatctaaatacaggaagaaatgaaccaaaacattagcagaggttgtctctgagtagtgaaattatgcatggttttagtggatttcttatttgagcttttctaatgttaataaataatatgtttcatatttgaaataagagaaaacccacgaaaggtcattttacctatatctacaaaaagatctcagaaatcatggaggaatgcttgttatagtgtccagcaaaaagaagcagtaaagaaactgtggaaagagtatgctgtctactttgtattaagaaaggggaataaaatcttaacgaccagaagacaacccactgaaatgtgacgggtgttttcttaggggagtgattttttatctcttatttttcttgcattttttcgttttctgcagcagtactggaaattaaacattaagtgattaagcagaaacaacctgaactataggagtaaggaaaaggttacaatggatgtttgtgtttctgagaagagaaatgaaccacccaagggtggagaatatttttgccttgactcccacaaaaagtgaatttttgcacccccacaaaaagttaaatgccctccctattgcaagaaaacaccaaaaatgctatttttaaatgatcttggcaaagtcgagtggcttaagaatgcacaggtacagaacaagtcaggcagggcagagagacagctgtataaacagtcattggtattcaacagccaagggaagaaggtgcatttagaaaagtatggtaaatgaatccatgccttccaaataaaacattggttaaaacttagcagttgagaccagcctgcgcaacgaagcaagttccctgtctctaaaaataaataaataaataaataaaccttagtacttaaagattgtatgtttaacaaacctaaactcaaagtctaagaactttctggaatcagtatttaaaaccgatattaggcaaagacatcctaatgatacatggcctgagacaaagtgggatctgccagcatgtcccccaaactggcaatccaggctgtcctagaaccagtttttggaggggttgtttgttccttggtgaggggcaagtggagacggtgcatcttttaaacattaacaattttcaacaaaatttttgtcagcttcataacgtccttaaattaaagaaccacttcagggatagttatagttgctttacttaggtggactttgcctcacaattattgcccaaattctaatgccaaagtgagcaaagccaaataatgataagagctacaatctattaagtttttactttgtgccaatccctctacacacaagatctcattttattcccaaagcaattcaatgaggaaggtaaaattataactcttgttttataaactgaggctttaaagattatataattttctcaaagttactcaactaataagtgagaaaactagaactttaatccaaatctctgtgaggccaacacccacatttaaccacaaaactatgctatcagacatttttaaaaatctttaacgccctacaggatttagttttaaaattacttctgtctgaatatactatgtttaatgtgatttatttctatcattgggaaaaattttaaatcaatacagaaaaatgtgatctatcacactatgggcatatattaatgtttaaggcacattctaagcactttaaaaaattagctcatttaatcatcacaataatcataaaatcctactgttatccctatttacagatgagaaaactgaggccacagaagttaaataacatcgaaattgtttagaaaaaggcagagtcaggatttgactctaggtctatttgattccagagtttatgctcttaaatattctatagctgtatttatatagcaatatagatataaacaaggatgtaagcaaagataatacccactgaatgagttgtgaaaatattttctcaccccactattaaattaacttactgggtatatacccaaaggactataaatcatgctgctataaagacacatgcacacgtatgtttattgcagcactattcacaatagcaaagacttggaaccaatccaaatgtccaacaatgctagactggattaagaaaatgtggcacatatacaccatggaatattatgcagccataaaaaatgatgagttcatgtcctttgtagggacatggatgaaattggaaatcgtcattctcagcaaactatcgcaagaacaaaaaaccaaacaccacatattctcactcataggtgggaaatgaacaatgagaacacatggacacaggaaggggaacatcacactctggggactgttgtggggtgggggtaggggggagggatagctttaggagatatacctaatgctaaatgacgagttgatgggtgcagcacaccagcatggcacatgtatacatatgtaactaacctgcacattgtgcacatgtaccctaaaacttaaagtataataataataaaataataaaataaaataaaataaatgttttatagggaacacgtcaatggttcactaatatccatccatctttccaagacataatataggtggaaggcccatgcacaaggaactgttgtgtttctgtggcttttttttcattagtttactcaagctcgaatcattagcagtatactaataaacacatggtggacatttctttggatcaatagatgtggatctaacattctttctaaattgctgcgtaacatgccgtagtatagatgttacacacatatttttatataatggcatttttatgtctagaagatcaatttccagaagtggaaatttacagcatactatcaccaaatcccaatacatgaactttgggtacacattcaaacaatagctgacttcctgagtgaattttctctcaaaaaactgtgttcatctattcatcccactaaaaacttttgttttttttggccttgcattgtagatgttgacagaaagataaaaaattttaaaataaatgaaaataagaaatcccatgtttcactttattaaagtgaaaaaacaaaattacatcaaccttagggagtcatttcagatagcaagagatccctcagtaggaaaaaagccccagcggggcatggcagcgcgcacctggaatcccagctactcaggctgaagcaggaggatctcttgagctcaggagttcaagaccagcttgggaagcataggaagatctaaaaagaagtctctaaaaacaaaataaaggaaaaagccctgagccacaccacaggagctaatgagctctgagaaacagaaatctgctcactcagatctttctacacttgtgtaagcattttggaggtctaggccaaacatcaatggttctgtctcttcagcttcctgcacgtgccatgaaaacttcttcaaattactctttaaatttctgttattttgggagctctatcacaccatgagaagtcttaagcctctgtgattaaaaataaataaaaattgtaacaccataatattttaaagctaaaagcaaatttaaactgtcatctctataccatttcacccatcagaatatcaaaactctgaaatacgaataatacacacttctggcaaagatgcagggaaatgcacactcagatgttactggcaggaatgtaaattgttgcaccattttgaaaatgaatctggtgatatcttttaaaattaaaaatacccattctctttcatccagcatttccacttctggaaattgatcttctagacatgaaaatgctattatgtaagaatatacgtgtgactatggcatgttaagcagcaatttagaaagaatgttagattcacatccattgagccaaagaaatgttcacaatgtatttattaggtgagaaaaactagatataggccgggcgcagtggctcatgcctgtaatcccagcactttgggaggcagaggcgggcagatcaggaggtcaagagattgagatcatcctggccaacatggtgaaaccccgtctctactaaaaatacaaaaattagctaggcgtggtggtgtgtgtgcctgtagtcccagctactcgggaggctgaggcaggagaatcgcttgaacccaggaggcggaggttgcagtgagccaagattgcgccactgcactccagcctggtgacagagcaaaactccgtcaaaaaaaaaaaaaaaaagatataaaaaagtagacatagtatgaggaggggaaggagaggaaaataaggggaaaagaagactgcaaaatgaaaatttgagaaagataatataatctaaactaaaatatggactggataatagaaatattacctcagtttcctcatgtgtgaaatgactataagcctcagagggttactgtgaaaattaaatgaatgaatacttttaaagggcttaggaaaaagcctggcacacagtagtactaaatgggtattattgttttaaaattctatctataatatttttgcaaaggtacacatattaaatatgcatagagcaataaatgatagaagatatcatcagcacataaaacattgctttgattcgatgatggtattctcagccacccttgaatggcaattttttttaatgttgcttttgctataaattaatgttgggctggggtgggtaatttcatctctaagcctcctccgctgaaggcaggactacatctcccctatgaaggtgaagggtatgttttcctgtcctacgttttgaaaacatttatgcttatcagcatcaaataactgccttttgtattgaattcaaaagtgtaattcaccttagaatgcttccattcgactgtagtgaccatgaatttagaatctaacacgaagatacattatatgactaaggatttttgaaaacttgcaaaaacggcataaaagttaaaacacacttattcatacatgtgataaataaatgacttttattgaaaagaaaaacttaacaggactgtgccagacagctgggatgaagaatgaccatctgggcaaatcctccttggaacgcagatcctcttgttacggtctcagtggaggaagtcagtaccatctctttcataaatctcaatctatttgaggacatccttcaactttatctttagagagaatggccacattctgctggctgtgacccagtctctccagagcccagccgtggacataaaatttggaaaagggcctggcgaatgccacgtctagagaaggatcatttcctggggcttttgggttatgttcctattaatataaatcatcgtctccatttcagaagaagaaccaaaacacatctgatctgctcttaaaggaaactcaattgtgacaagcagaggaaactaaagaggtaagagtatttccttgctagtggtagaattggctctagaaccagaaaggttaaattataaatctttggcaaaacacagctttctttacgtcattttcctctgggactagatgagaaacagctgggtatttggctagagaaaccgctggaaaaactcacgttggttaacaacacttctcccagaccttcacatggtgattgcagttcatctcagctctaatgccacctcctcagagtctctttctctgacactcaaccccatgccctcttcttaaacatatcaccctcttcctttagggcacttatcacaatcgggaatgatcttatttatttgttaatagtctctcttctcacaaaacataagcaggatgagagcagagcccttgtctggcaccctcgctgttgtgtcctggtcctagaccagtggtggcacagagtaggtgcccaacacatatttgctgaatgaatgtaacatgactgcatgatcatgtgcttttctacttctttcttccagtgtttctttaatgagcatggatgtagtgtgcgataatcattacagtttttctttgaaaaaaaaaacatcagccaagctgatttcaaactccacttgaaatacctagaaaacctagttagtgtaggttcccatgggtcctgaaaggccaggatttttgccttactcattttcatatccctggcatccaacacagagcttggcacatcatggacattcaacaaatggatgggtcggcctggtgtggtggctcacacctgtaattccagcactttgggaggccgaggcaggaggatcatgtgaggtcaggagttcaagaccagcctggccaacatggtgaaaccacgtctctactaaaaatacaaaaattagctgggtgtggtggcgcttgcctgtaatcccagctactcaagaggctgaggcaggagaatggcttgaacctgggaggcagaagttgcagtgagccaagaacatgccactgcattccagccaaggtgacagagtaagactgtgtctcaaaaataagaatcagaaacaaaaacaaaacaaatggatgggtctatagcaacatgtgcctgtgctatgctaatcactttatttttcatgacctatctcatttaatcaccacaacaatcctatgacgttggattgtaatccacattttacagatgaaaaaaaaggaggcttttaacttccttaagttaaaaaaaaaacagcaacaacaaaaactttccagtaagagacagagatagtatttggatgcaggtctgtcagactcaaagtcacctaattgctgcatcttatggtctttctaacttccataagacaaagtcactcagcaaaagttttttttttttttttttaagggcggaggcagtgaaaccaatgatgcccccatgctaaagtctgcatactctgattgtagctagataactgttatccagaacagggcaaagcacagtgcaggtgttcaataaataactgttggttcgaagaaaggaaggaggagaaggaaggaaggaagggagaaaaggaaggagggagtaagagggaaggaaggaagaagggagggagggagggagggagggagggagggggaagggaaggggaggggagaaagggaagggaagggaatgggaggggagaaagggaagggaaggaaatgggaggggaggagagaagaagggagggtagggaagacaatggcagagagagagggaaggacaaagggaaggaaggaagaaggaaggaaggggaagggaaggtaaaagggaaggaaggaggaaggcaggaaggaagaagggaagggaaaggaaaagaaagaagggagggagggaggaaggaagggagggagggacaaagggaagggaagggagggaggggttgagggagggaggggaaaggaagggaggaaagaaggaaggagaagggagataaagaggaagggagggagggagggagggacggagagagggaggggatagtaaaggagggcttctctgaagatcgtcagagaaagaccaagagtctttggccaatgagagaatcagcttcctgctctgtgactgatgctgctgacatccagggagccccaaatgccttccttgacagggggtacttctgcaacacctgccccagttctaggcacatcagcatctccagcttgcattagtggtcactgggccctggctggattgacactatgacctactggagagggaagaaacagaaacaccagagtcttgagtgaaaactccctgtctccctcccacctctggttcctcggccacactgagaaatatactttaagatcagactccaaagcccacgactgactttacttggagtggagatgggatcagtgtgtgtgtgtggcatgcgggcgggcgggaggtggttaataaacttctttctttgatgattgtgaagacacaggctctctctccttagcaagggcttctcatttgaagcagcgcgtgataactcattgtgtgaccgcctgttttctctgcagatctgagctgaaaaggatcataccagatttatttcattgctgtagagccagtcccaccacactgcctgggcacatagaaggcatgttttgttaatttatgcagtcaatacaaactaattgattgcagatcttcaatcctttgtaattccaaactcccaaaatgctctgaaaaccaaaagattttctgtaagctggcagcaagctcattgaactcaccggaacggatgcatggcagtccccagtctttatgatctgccttaattgtgactacagtcttctcccctcatccatagtttctttttccgaggcttctgttaccaatggtcaacaacagtccaaaaatattaaatggaaaaatccagaactaaaaaatttatgtttttaattgcttgccattctgagagaagtgtgatgaaatctcacgctgtcccagtctgttccacctgggaaatgaatcatccttttgtttagtatatccatgttgtatgtgctgccttccccatacagtgtggttatataagaaaaaacacaatgaggccaggtgtagtgggtcacacctgtaatccagcactttgggaggccaaggcaggaagactgcttaagtccagaaattcaagaccagcctaggcaacatatgaagatcctgtctctacaaaaaattaacaaaattagcctgatgtggcagtacacacctgtagtctcagctactcagaaggctgaagtaggaggatcgcttgagtccgggaggttgaggctacaatgagttgcgatagtgccactgtactccaacctgggtaacagagcgagactctatcttaaacagaaggagggaaggaaggaagaaaggaaggagggagggaaggaggggggggaagggaggggaggggagagagagagaaagagagaaagaaagaaaaaagaaaagaaagaaaggaaagagaaagaaagaaagaaagaaagaaagaaagaaagaaaaaagaaaagaaagaaagaaaggaaagaaagagggagaaagaaagagtttacatagggtttggtcttgcccaagcttgcaggcatccactggtggtcttggactggatcccccatggataagagggcactactgtattgatacattttgcatgtttcacagcagaaaagcaaatgtgtttgattatgggatgcagccccaaactctgtgggggtgttatataacttagtgatactcaccatttgagattcctaaattctgaattgtcaaaacacttggccccgatgggcttcagataaggtgtttgggatgtgtatctgtttgtatcaggcattgaggtgctgagaatactgtagttgaataaaaccatcaaggcctttactgtcttggaattgacttttcagctaacaagacaataacaaggaagcaaatacgataatttctgaaagagataagtgttctgaagaaatgaaatcaggagaatggaatagagatatgatggatattagagaaatccttgctaagaagacataaataaagaaaacgtaacaacctggtgaagagattatttcaaggcactttcactcattcattcatgcccattccattcctacctcaggacctttatacctgctgtctcttttacctggaagaagcaaattatgtaaccttctcgaaactcattttgcttaagattgctcatgtctgtaaagtgtcagggctggaacaaaaatcaaagctctatgacacaaagttagatttgtggggtcatgagggaaacacccaccttaagagcaggtttggaggattagatagaagttctctatgaacttgaccacaatagctgatatcacagcacagtttctcctctctcagtaataaagactcagatcaaggcagcatctctctgagcaaggaatgaggatccttctatagaaaagctgggacctggctagtgtgtctactgaactgctctttcaaagttctgcactccctccacacggggcttgagtttccatagacaaaaaaacataacatggtcaccaaagagaaccttcagcattgtttctccagcaactgagactccagtgaaaagtacaccttcctgggaaccagcacccaacctatcctggaccaggtctcccagccaatggtgctgctcgtgagtgtccagtcctcaattgttttgttattattgttgctattgttgttgggtttcccttggtcttcttatttaagagaaggtagaggctgctctaggggcaatgcttatgcctggaacgaatgagcctttattgtggacaagctctgtgagtgaaggccctccttgagtctggtgataaaaataggctatggccaggcaggatacagaagagcatgaccaatcaccaaataaaggtttattggcttatacattttattgtaccgtgacatccctcctttcagctttagatgtcagcagctggtggcaagcttaatgactgatgcataggggaacagccatggacaccacagtttggctccccctaaaacagtgatgcttcatccttacttggccagcttctggaatcctagtgaacacactacagaacatcaggtttgcctgggcagtaacatccaaggggagcttccaggttcctcttggctgagcaagactatttttttccttatttcaaagagctgttgttctgactaaaggaagagaggatgtatatggtaatgagaactgtatacatttctcctaaagtctcctactttatcttctttaattctgcatctgactctgcctgggtagaaatcgtattcaaaattatcccagcctcttcaatctccttaataagatctctcaaaatggaacacactgtctcgtgtgcctataagggatgtgcaatgcctcttttgtgcttttgttcactcttatctgatgttctaacacattttcactttgaggagtttggaaatgtatctgcatagtcattgccgtttaagtactccactgattacaaaatgctttcatacacattgtcttgaggaaatgctctgaaaaataaactgctaacactctggtaaagagccttctgcagttagcaaaatagtcaccaggaccttctttttaaatgactacactttccacactttttctatctttgttgacttaagttcaaagtcaaactagaaaatctgttttgtcagatggaagttcgctactcaccgttctgagaggctccatgcacagctcattgtgttaccccactgcacagaatctactcttctagagagacactggcagctttgtgctttgcatttatttattcaatgctgcagtggcttaagccagtttatggaaaatatctctaaacactgagacctcagggctaggaggaattcctagacgagctctaaatcagtagttatgtttggcagattctatattcccacggaaaggccaactaaacagtcattacgctttataggcgtgcctgtgtgtccttcgttattttggaagtatcaagcagggcctagaagcatggtatagttagtgccagcacatagtggtggcctgcagtccaaccatgctgattgatttgatgtttagggaggcagtttcagaggaaatacggtaactcgcttgtctatcaccgtgcttcctggatgagccccagaaatgcagcgtttgggataccattagcaagcgtgtggcagccttgccctgctgagactgctggtgattgaaaagtgctcaaactgtggtcagagaagaagtgtgcagatgaaaagaagggagataagtcttcgatcacgacgcctgcccttcttcacctaaatatcccccaggacagtttgccaaacaccagcctgttgctcaaatgagagaaaataagcctttagtttctgtttccactctgcttcataaattaacaccatcaactgacttttccccggcctttctcccacagcttatctttactgccaataatcctacccatgagaaagatctttgacaagtcaagtactacataaattcaagaaattcatatgtggtatttcatgcacatttcaaataaagaaacttacaaggataccgtttaaaaaaaaaaaagaacatccccatagttttgaagcaaatgtgcattttctcgttagtaaagagacgtttccttccctctaacttcccagtgttggacaaaggactaaaatttcatgttataaggaaagcatgtaaactccgcactgcttttctctgaaatagcagtcatttcaatgatgtgctctatcatcaatccccggagactgtaggcttttctgtaactggttccttttcgttttcctcattggataataatttttcagaataaaatcttttggtatcagtattttcaaaatatttcaagacaccagccattcttaatcaggccactgtggagctctatgcaattaagttgctaaagttaggacagagcccttagtttcagatttcagctccatatatctgaatggaagctcttgaatggatgagcattctgactactgcctggctaataattttccacttgcatttggccgatcctacacacatgagcataagccagtgtaaatgctccatcagaggctcttagcaggaagaaaacaactaaacagattcatttcttgactttcttctttgatagatattttcttactcttaaatatactttactcctgataatttagagatctatcgttggtgagaggatatcatgaattatgagtccttgcattctttttataaaggtaatatccccggtttgatgagacagaaatttgcaatagcatctttgcagggcttttcaaagagtagtgggaatggaaaagttccctgggacccatttcctgactgttccattcgtgctgatcacgactttaaccatgtttttcaagctgccaatcaaagcacacgttctataaaatacaattccctggtaggcacagtggagctaaatatttgtccctagaactgtcctgggagagaaaggacataaagttgctgccactaggttaaaatttaagaacaaaattataggaagcagactccaaactattttcttaaattaattcttccttttccaaccagaacacaatctcccctattgtcatgtacgccctgatgcctagttgggtacacagcaaatgtacacacatatctgatgatttactgatggactgaatcctcacaaatattacatttaaagctttcagatcaaattaaataatttgcatttgggcaaacagccaacagcactctaaactgtactcctaactaacgttattccctcctctacctcttcatccctggtgttctctgcagaccttccaaatacaaactcactttcacaagaaaaaaaataactgcaaagtatgattcaggtcagccaagaaaggaggtcatattaattttatttttcttgctctgtttcccaggctggcatgcagtggcatgatctcggctcaccgcaacctctgcctcccaggtgcaactgattatcctgcctcagcctcctgagtagctggattacaggtacctgccactacgactggctaatttttgtagttttagtaaagatggggtttcaccatgttggccaggctggtctcaaactcctgaccatagatgatccaccgccttgtcctcccaaagtgctgggattacaggcatgagccactgcacccagcccatattaatttttaatttctgtttatgcctatgaaaaatgtataagttgttctacaaacagaaatgcacttctcttgctagggttgcctcaataaatttaagcaacgtggcactatatttcctttataaagctccttcctacatatctcacacaacacacaagaaagtcataaccaaattatttaagaagaatttctcaaaacactaagacaaaagccgtctcttctaaatgagtaacgtggaaggtaatcttgttcccttactgctgacatgtagctttctgcctggggttttatctttaactccctggtaatccaaacggagcaggaaaacctcagacaatagagcctcttttttgctttacatccacttttttggggtcggcaccgaacaaccatcattaaatggtttctggcgcaaagtggcaggcttgggtaagctgaaatgtttatgacaccaaaataaagatgttccacactgctgaaaccggggagtcacgcagagaacaactgaaatggaattacacaccaaggtttacttaactagcacgactttaactcgtgtctgcctgatacacttaccaaagagaagtggcagaaacccagggtggacaaaagagggcagtgttcactatgtctttcatctcagctcttcgctctttatcaaattgccactgagccaagagaaaactatgtccagcatttcataacacaggaagtggggaagcagattagatattgggctctgcagtcaccacaaaataagcagtgtgctcgtaaaagtcacttttttccctagacgaaagcttaaccattggtgagttttggggtttggtttctgtttttcagtatgatcggctaaacctctccaggaaaataatggaatatgtaatatttctcaaactataacaggttataaggtttatttagttcaaagcactcatttttgcagatgaggaccaggtttctacatttgtcagtggcttctccttgtgctcagatatcatcagtatgtggggaggggaagacagacttccctcttggagctatttagagaatttttagtcatttcagaatagaatccatgtacgccctgtacacaaaaaaatttaggtcccagaaagggaatcttgtcccctgccctggatgtcatcatattgggtcgaacttcattcacattctttgggaaaagcttatgtggacatgtcattgtacccaataaaggattgcagcctcagcactcaaaaagtgcacattttgcccaggtatctgtctattcttagttatagatatctagtgtcatcttttaatagggaaagactctttaattcttttgtaattcctgttgtcctatacatatttttgagctcctgcgatgtataagcctctgttgttagacatgcagaagtgaaaaggacacagttctagcctttaataaactaagcatcaaataagaatcagatggccgggcggatcgcttgaggtcaggagttcgagaccaacctgaccaacatggagaaaccccatctctactaaaaatacaaaattagccgggcgtggtggtacatgcctgtaatcccagctactggggaggctgaggcgggagaatcgcttgaaccttggaggcggaggttgtggtgagctgagatcacgccattgcactccagcctgggcaacaacagtgaaactccgtctcagaaaaaaaaaaaagaatcagacaaggcagaaccaaccttgtcagtaaccgtaatacatcaacaaccataatacaaggcagaatggggttggcttagaagaaaaatacaaattgccaaagaagagattgtattcatcaggagtggagaactgagggaaacttcacaaaagagagagctgtggagtcgggttcatagaataggtgggcttccagcggggtgtggtggctcatagctgtaatcccagcactttgggaggccaaggtaggcagatcacctgaggtcgggagttcgagaccagcctgaccaacatggagaaaccccgtctctactaaaaatacaaaattagctgggtatggtggcacatgcctgtaatcccagctactcaggaggctgaggcaagagaatcccttgaacccaggaggcagaggttgcagtgagccaagattgcgccattgcactccagcctgggcaacaagaatgaaactccgtctcaaaaaaaaaaaaaaaaaaaaaaaggtgggtttccagaggcacagggatggtgaagctgaacaaaggcaaagaggtaggagagtgtgggcccagtgagcagccacgcacttacactcgcaaagggaagagatcaaataaatggcttgaaatgccagtgaaagcctgcagagagcttcaacgtcaggctggtggacttgattcccaaggcaaccacaggaaagcaccaaaggtttttgatgcaagcaggaacatgatgggagctaattttaggaaaattggtctgccatgaagatgtggagcagattcaaagggaaagcagagacaaggaggccaaggaaggcactgttagtgcttaaacagatgtaacgaagttttgtggtagacacaacccaaaaggaaagacaggtacaagtgtaagacgcacagtgtttcaaagtgttttgccaacaaagtaaatgttgaaaagcgaagttatagcgagggaagactgaaaaagtaattcataaaagcactaagggaaggctgaaatgctgggtggggtaagaaactcaggagtttggccttgagtgtgttgacttggatacttctacaaaatatagatggggagatgtccaaggaatcgctgaaaaccaggactggtgctcagagaaaggttagaagaaggtcacattccaaatcaaggtatacctggctgatgcttgaagaccatcatgcttgaagaccatcattctggaagaccatcttgacatcccaaatcacagtttgacaccatttgccatctctcttccaggtgctgtgctgttggtttaggaatgcggttttcttggatcttgtatggtttccacttgtcttgatattgatatacaatggcttttaaatgcccaatataaaaacaagcattgggccaggtgtggtagctcatggctgtgatcccagcactttgggaggctgaggcaggtggatcacttgaggtcaggagtttgagaccagcctgggccacactattaaaccccatctccactaaaaagacaaaaattagctggatgtggtagcacacacctgtagtcccagccacttgggaggctgaaacaggagaattgcttgaacctgggaggcagaggttgcagtgagccaagattgcactgctgcactccagcctgggtgacagagtgagaccttgtctcaaaaaaaaagcaaggattgccatgaaacctgaattagtcccagagggagggaaagagaattcttatttgctttacaaatggataattcctatagaaaatgctagtgctctgaagacattttttaaaacatgatctggtttatatacaagtaattacaacagctttctaggcaaaccttcatttaaaaagtaaggtatggcagggcacaatggctcacgcctgtaatcccagcactttgggaggccaaggcaggtggatcacgaggtcaggagtttgagaccagcctggccagcacggtgaaacgcagtctctactaaaaatacaaaaaattagctgggcatggtggcacatgcctgtagtccagctatttgggaggctgaggcaggagaatcacttgaacctgggaggtggaggttgcagtgagctgagatcatgccacttcaccccagcctggtagacaaagcgagactccgtctcacaaaataaaaataaaaataaaaagtaaggtatattccaacattttggacagacttacaactttgttcttggggaaaatgaaagcaatgttactggaaggaagataggacgttaggcggcagtatggtgtattgaaaagacctggaatcaggtttaaatccagaggtgccccttattaggtatatgagcatgaatacattgcttcactgctctgagacacaatttccacatctctacaagaaaataatagaatgttctgtccaaagttactgtattgcataaggtaatgtatatgaaattgctttgcacaggacttggcacaaagtagctgcttaataaaaagcttagagttccttgtggtggtccagttggaatcccttctggccccaaaatgaatgtctcccccttgactccttccctggggtgcaccatgccccctagccgtaattcttattcagagctttgctctcttggagatgtttctctttatccataacacattggggcattcaggaatgctggtcctgccctttagctggaggacaatcatttcagacccaaaccaggcactacgtgaaggaggttccaaactccaaacagtgccaggtccttctctcctccacttcaggaccagatgaagacatccttcttggctctttattctctcagcctccaggaaagagtcagacaacccttataatcatgacttcttattaagcatttacagaatcatgctatatggcatcattctgggtccttggttatgaaatcttatactttaagtatgcattacttttaaatgacaaaaaccacaattacttttgcaccaacctaatacttttgtgaacagtattttctttgatctctacaataagtctatgggaaaataatgaggtagttaagagcacagactgagtgggttcgaactggagctctacgactcactagctgtgtatacccgggcagttactcattctctccatgcctcagttgcctcctctgcaaaatggggataataagagcacttatctcatgtgagttactgtagagcttaaataatatatctgtgaaagctcctagaacagtgcctgacacacagcaagtacgttcaattgcattgtagcccatactcttccaatgagaaaactaaggcttaaaaaggtgaggcaactgcctcaaagtcacatgccttaaatgacagtgctatatgaaaaaaatctcaatatcattaatcattagagaaatgtgaatcaaaaccacaatgagataccatctcacaccagtcagaatggctattactaaaagtcaagaaataacagatgctggcaaggttgcagagaaaagggaacacttatacactgttggtacgagtgtaaattagttcaaccattctggaaagcagtgttgtgattccttaaagaactaaaaacagaactaccaatcaaaccagcaatcccattactgagtatatacccccaaaaatataaatcattctaccctaaagacacatgcatgtatatgttcattgcagcactattcacaatagcaaagacctggaatcaacctaaatggccatcaatgatagactggataaagaaaatgtagtatatatacaccatggaatactgtgcagccacaaaaaaagaacaagatcatgtcctttgcagaaacatggatgaggctggagaccatcatccttagcaaagtaacatgggaacagaaaaccaaataccacatgttctcacttataagtgggagctaaatgatgagaacacatgggcacaaagaggggaacaacagataccggggcctacttgagggtggaggatgggaggagggagaggatcagaaaaaataactgttaggtactaggcttagtaccttggtgatgaaataatctgtgcgccaaactcccatgacacaggcttacctatgtaacaagcttgcgcatgtatccctgaacctaaaataaaagttaaaaaacaaaaataaatgatagtgctagaacttaaactaagaactctcttgacaaccaggaccacacataatttgattaaaagaaagcaaaataaaagtctcttttattccctcttttttagagagtttcttcatcagagctacctgtgtcttgctcattcctctcccttccttctttctcccctcaaaagattaaaggttacattgtgaaaaaaaaaaaaaaaagttttgtattgggatcacatctaaggttgactgcttgctctctcattcctcagctagtccattctgtgggtcttcctcatcttgaatcagattctctgataagctcattactccatttatctgtttagcaaatactaattgagtcagcatcctcctaggtactagatgcaacgatacagtcccaccccccgggtgacagtgtagttagtcaagtcattgtttactagaagtaactgagttaccaaaggaaattatgaaatgttcttctctttaaaaataggatagcttcttagtcagctgcctgtctggctaacttatctagaagacaagagagcaaaggcctgggagagattcatatcaaacagaggggaggctagttctttgtaatttgactaacagcccagaacagagctgagaagacccaggcaacgtatattttgtatgccattgcttttaatggctgcaattacttttacaccaacctaatatagcaaggcagtgaagagccaggtcttggtaagaataatgtgatttttgcatcacagccctgccatttacaaatggtacaatatcatgcaacttcctgagctctttctcagcttccttatgatattcctcatgcagttgggcaagatgttaagaaaatgggtatgcaaaatgcttggcactgagcctgccacatagtgggtgttcaataagtggtgacttacaatgttataatagggcaaattataacgggctggggaagggcatgatgcatagggcaagctcacctagattgtgcttctaaaaggggctgccatctgctacaacaggcttccagaaaagtctaagccaggtttgctgccattgagtactggaccaagctgtcaacctctagaatggaaatgccttcaagctactaatgtcatcaagtagccaagtcaccgtcttatgtaaaagcttcgactttgtttctctgatttcatctttgccctctattgtctaatcttaacacagtttccaaagaataagtaagtcagatatgccattcctctgcctcaagtctcccagtggacatctttttcttgcagaataggccattggtattaaaaagagcttggccaggcgcagtggctgatgcctgtaatcccaacactttgggaggctgaggcaggcaaataacttgagcccaagagttcaagaccagcctggaaaacatggtgaaaccccatctctacaaaaaaaatacaaaaaaaattagccaggcatggtggtgtgtgcctgtagtccagctgctctggaggctgagcggggaggattgattgagcccgggaggtggaggttgcagtgagctgagattgtgccatgacactccagcctgggcaacagagctagaccatctcaaagagagagcgagagagagagagcttgttgttagtccaaaaacatgcttcttcctccaggcagacacaatcctgcatcaaggcacaaggcttggtgagctcaggcattacggtgcagtgaacagatctgcacaatgctaggcttcctggccacttcctctctcacttcatctcctgttactcttctcctcaccctctctgatccaactgcacttgagttctttgaacagcccatgcatgcttctgcctgggttcctttgcacttatcatcccctctgtctggaagcctcatcccctagacagtctctgtcttgctcctgatcacctcatttccttctctgtttgcaaatcatctttgagtgaggttttcatctacctccatatttcaaattgcaatacttcttcccctgggaaatatggccatattccccacccctgcttcaaagtctccacagcactcatcaccatttagcatattatactatttataatatatattgattttacactctctcctcccattagaatataagttgcacgaaggcagggaaattttactgtttttcactgctctatctccagggcctggcccatggcaggagctcaggaaatgtcagataaatgattgaatttacaagaacaagcccaacagttaagaaaacttcagctcctgcctcctgcccatgcagcccagaagggccagtttcatgccatgtttgattgccgctccggtcccaggagggatggaatctgctgtctcaccaagacttgggcatgaggctggccttctccagaagctccaggcccagagaaacaatacatctaaccaaagtcccccagggagtcttggcacacagttggtgctcagtggacattggaatgtttcaacagccatgtctccttgttgctgaactgagcaacatccatggacatccatgggacagatggttctctctccagcatggaatcagaaggcctggtttcaagttccaggactgtgcctcattcattgtgtgttgctggctgagtcacttaacctgcctgagcaaagaacagagaagcagtcagatttggaatccactggggaggcagggtttgtaaaacttgttgattaaatgaacaagagtatgtgggaatgagaagaatcaaaatctaagccaagcatctggcctgaacagctgggtggtcagtgaacccatttcctggaatgaagaagatgggaatgcaggggtgtttttggagtggagtttgggtcaagagtttggatttctatgtaatggaagttgtgggcagccattggaaggatattgactttccttccaaggagctggagagcttcttagaggcctttgtcacacctacctggttctcccagctctctccagctaacagcccaagtccttctctccggctacatgaccctacacagtatggtccccactgcctctctgcccactgcccataggactccttcttgctctctgttggcccctgctctaggatgtgtcccttactttctcagcaggaccttctcatctcccagatacccacctggctctcccatcacctccttcaatctttgtctaaatgtcaccttctcaagaaaaccaagcctggccactccactctctgcaaaaatagcaaaactctacccttcctctctctagtatcccctgtccctctcactgggtttatttttcttcaaagtacttaccacattctaattcactcacacctagaatctctgcttcctctcacttgaatataaacttcaggacggcagggatttttgtttgctttgttcactgctgtatccccacagccgagaatggtgcccagcatgtagtagggcagggatttttgtttgctttgttcactgctatattcccacagccgagaatggtgcctagcatgtagtaggtgctcaataaatatatgttaaattcattgaaatgcattatgttatctttctttcatatgaaaatcattgttcaaatattgatttgtttttaataggaagtaagaaagaggaaattcatgtctgaagttctttgctgtcttgatgactcacttcccaggtaaactaagacagttggtcactcctcctatcactccatttcacagttgagaaaactgaggcttaatgaaattctgaggctcagtgaggcttagtgacattataatttttctagtgccttcaaaaaactaaccttgcatggacctgggtaggtcatccagccaaacaagtataggtgagcaagacccagcatgtttttctcatactcacacccactcctgatgtgtcagtgtgtgaggattagatcttagattagcacagatttgaaaagccctgtcattcatgaaaaataaagctatgagtaatcttttcgtgggatcctgcggaggcaaggactcttctagtcatcagcacaggaccctggatcttggcttccctctttgatatttattaagcactacagcctttaagaaaggcacatacacttgaatattcatagcagcactattcacaatagcccaaaggtagaaacaacccaaacgcccatcaaaagatgaatgggtaaacaaattgtggtgcttacacacaatggaatattaattcagccggtaaagaagaacgaagtaatgatacatacaacaataagtagagcctcaaaacggtatgccaagtgaaagaagccagacacagaaggacaaatatcatgtgattctacttataggaaatgtccagaataagtaaatctgtagagacagaatgcagattgctggttgccaggatggtgggaagaagagtggagagtggctgcataatgagtgcagatgggtttttattttggagtgaggaaaacagatagaaatggtgggttgcacaacattgcaaatgtacttagtgccacttaattgttcactttaaagtggttaattttatactatgtgaatttcatttcaatttttttaaatgcacacgcatacatttgtcaagtaatccttacataaaccctgtaaggtagatattgctaccattattcccatgagaaaactgagcccagagctggaaagggacctgaccaaggttccacaggtgctagacttgaagccaaggtcaggttggctccaaagccttggcccttctgagccaccaaccactgatcctctcagagctgggcatgacctcaggagaaccaagggtggctggaggctgtgctcaggagagaagaggaagggtcaaagtcgggaaaagctttgaggtctctttgcggttccaacttagcatcagcaaaactcagtgtttctacctttttgctcctggtactttggttccatcgtatgactgagttacacaggcttgatctttgttcctcttgactccttttttcttccttcatttctttctttcttttttcttttttcttgagacaaagtcttgctctttcacccaagatggagtgcagtggtgccatcatagctcactgcagcctcaaatgtctgggctcaagcaatcctcccatctcagcctcccaagtagctgggactacaggcatgcaccaccaatccaggctcttgcctccttacatcaaagaacagccaaagacggctgggcgtcgtggctcatgcctataatcccaacactttgggaggctgaggtggacgaatcacctgaggtcaggagttcgagaccaacctggccaacatggtgaaacctcatctctactagagatacaaacttagccaggcatgaaggcacagtcctgtaataccagccacttgggaggctgaggagaagaatcacttgaatccaggaggcagaggttgcagtgagccaagatcatgccattgcactctagtctgggcaacaagcacaaaactcaaaaaaaaaaacccaaaaaaaacaaaaaaacagaacagccaaagaccatagataaggggtgagattggggactgggagaagaggataaagagttagaatactacagaacactagaccacaggccctagtctcctatttctctatccttccttaaaatgtctgaagtctttgactcagcaatgtagcacttgagtgacttgaatgtaaacatattttgaaaaaagagcatattttagggagttccattgcagaagatttgaatgtggtgtaattcagcttgctgggagaggcggggtggctggtgggtggatagaaatggaaagatggaagtgaatgtggcagactgacacaataatagggctaatgatttcaacattttaaaagtttcacagttccgagggaacacaggagacgagctccagtgggaggcttttaaaatatccactttgacagtttctgtactttttgagcttcttctgtttgtttcttccccaaagcttattagcacctctgttctatttaggagactctccgccaccttagtatagggaggagaactggctccagggggctgagccccccaccgccagtgatagatctctcaggaatagaagatttgagtcctgggagcctgtcaaggacttttcctcttgaaaaatcatgaagctttggtccgcaacattgttaaagggctttagaggaagcagagtgtctccttccacactccaagtagcccaaagcaactgtgcccagatggtaaggacttccttcctagctggggcgggcggcagctgggataaacactcatttaagccactcagtgctgtcctcactgcttgccccaggaaagggccaacccggtatttctggctgagtcagttgggcctctcccacccattcttctgaacctcattcacatccagaaagaggaggctggaaaatttgaatatgcaaaagacccaatgacattgccctcaatcagctcaattagtgtggttgtgaatgaagatatgaagatcaaacaggtcaaagggaatgtttacaaatgtatcagctacctggtttgcagatccctttgaacagctcagattttggtgcagtttctataggtattaaaacaggaaagattaatttaataagtgactagagtaacatctgggggaaaattatattcagctgtatgagataaagaccattgtagaagcattttcttcaggcacgctctgctttttcttttgaagggctctcttgtgcctgatgttttatatatagtattaaaatataatggtaaaatatttcttggaaaaaaaaagataaaaagaattgaaattaaaggggataccaacgatgtgtgtgtgaaagaaaataagatggggaatgtggacaagtgaataataaatggagaagtgcttgtctggacgttgttaatgtctccagaagttttcccttcaatcttcctgtgagctacatacagtgccgtggttaaaagttcaggctttaggggcagaatgtttaggttcaaattcctactctgccacatagctgtgtgactttgggcaagtacccaacctctctgtgcctcattttcctccttggtgaaaagagaataatacaactatgcactcagctggtttttttgttttgttttgtttttgagacagggtcttgctctgttgcccaggctggagtgcagtgctgcgatctcagcttactgcaacctctgactcctggattcacgtgattttcctgcctcagcctcccaagtaaatgggattaaaggtgcgcgtcaccacgccagctttgtattttttagtagagacggggtttcaccatgttggccaggcttgtctctaactcctgacctcaagtgatccgcacaccttggcctcccaaagtgctgagattacaggcatgagccaccacgcctggcctcaactggttgttttgaaggctgtatggaaatgatgcacatgaaacagtggctggtctgggacatagccaaccaagggctgctccatgacattttcattgtttaaaatatataaaaaataataaatgaaacatttttatacagaaatgttgcttttcccccctgaagacgtaaaatatctacctaggtggatgctttctttcagctgttaaagacatgttgagtgttccctgccaggaatcggataccactttgagtacatttgggctgaaacataaaaatatctacagtattattctaactgtttctgtgacagtttaaatggcaattgctttctagacaattgcatttttcgttcaaatactaccacaggaaggcttgcatagatttcaattaggatgatagacccaaaaaggctttataggtggcctactgttagttcctgagctcccagcaggaaagtgccaacataaaacctgatattaggaatagtgacagcaattactaatattttctagtgccctgcttcatggcaggtgccagtctcaatagcttatatacatatctctaatctctatgcatatctctaatcttatcagctccaggaggcagatgctattagccacatttgacagatgaggaaatgggcccagagctgttaagtgatgctaagtgtctgaaccagggctccaggccaggcccatctggctccctccagttcacagggtatccaactagctcttggtccttgtccctataacttctgagaccaaaagcaatgcatttcagaatgttaccatttgccagaaagttcttgatatcgactataacgttcatctgctgcaatttatgcctctctcaggcctctctcctgcatactggacactccccttccccactcccacccttattctcccactcccattggcgatctcacagggtcttcaccttaatcccatggttgtcaacctggggagtttggccccaccaaggacattcagccatatctggagatacgtttgaagccacctgcgggtggtggggaggtgtgctacaggcatctagtgggtagaggccagggaagctgctgcacatcctgcagtgcacaggacagtccccgaaagaattatctggcccaaaatgtcaatagagcttagactgagaaaccctgaaaacagaactcttgatttctgtgccccaaatccgttcttactcaagtctgttttctcagtacaagtcaccatgactcaaagttgtttctcaggcctcaaatcaaagagtttgcctaatttgtccctttcactcatccctttttttcacatttaatctctaactgtcacactaaagaaaaagagtttggccaggtgcagtgactcacacctgtaatcccagcattttgggaggctgaggcgggcagatcacctgaggtcaggagttcgagatcagcctggccaacatggtgaaaccctgtctctactaaaaatacaaaaattagctgggcatggtggtgcacgcctataatcccagctactttggaggctgaggcaggagaattgcatgccattgcactccagtctgggtgacagagtaaggatctgtctccaaaaaaaaaaaaaaaaagaaaaagagtttaattcaatgatatttgactcatgttccccttctccaacgtggcggttcagctaactcattacagtatctacttattcatccaatcaacaaatgtttattgagagacctctaaatgctcaacgtccatatcagcttcactggaaccctgtaaagcctcctaactttttcagttttcatgaaaatacagttaagtaccaatgggtagtttatttgatcgtgttcaaaagattttgctaaaacactaaaataggctgggcgtggtggctcacacctgtaatcccagcactttgggaggccaagatgggtgggttacttgaggtcaggagttcgtgaccagcctggccaacatggtgaaaccctgtctctactgaaaatacaaatattagccaggcatggtggtgcatgcctgtaatcccagctacttgggaggctgaagaaggagaatcgcttgaacctgggagatggaggttgcagtgagtcaagatagtgccagtgcactccagcctgggcgacaaagtgggactctgtctcaaaaagaaaacacacacactaaaataaagaaaagtttaggctgggcgtgatggctcacgcctgtaatcccaacacttagggaggccgaggcaggtggatcacaaggtcaagagatagagaccatcctggccaacatggtgaaaccctgtctctactaaaaatacaaaaattagctgggcatggtggcatacttctaagatatttatcctaaggagacaaactattacaagaaatctttttttaaatttttatttccataggtttttggggaacaggtggtatttggttacagagataagtttttttgtggtgattagtgagattttggtgcacccatcacccgagcagtgcacactgcacctaatttgtagtcttttatctctcaccctttttttttcttttcaaacttttgcaaaaggtgtcctagttcttggcaatgtttcccctgggctctggttacatcattaacagttgaatcacaactatacccagacagtcacctgggagagaactgggaacttcatctggtttggcgaccactccctcctccggcggcaggtatctagcagcaggataactgatatcgtaaaggtgggttttgataaaggtgggagtgtgcactagacttgcagaggatcacacttggatttcaacaggatggggtagaaagataagagcaatgaattgtactccttgtttttttaaaaacgaaccaaagatagagagagacacatgacagtgtcaaaaaaaaaaactctccttttttattctaaaatcctgttttcttattgagtcaattgcagaggtccctctgtgacactccagaatataacccctccctgcctggaggccttgctcaggataacttttcccgtctgcctgtggctcagaggtggttggagccaggctgaatggagggcaggcaggcagctctgctgattcttttccacttgaaagggggcttggggactgagacagccatcatcccttgccacctccactgagccagtctgttgcgggtggagactgaacttggactggctgaggacctgggtctccctacactggccaaaccccacaagcctctcacagcctgcagccatcccagcgtgtctctgagcactctcattccctccaccctgccccacacctccatctttcagtgtctttgtcctgccatgcaccgttccctctgctagaaatgtccttctcatcctttaacccgtaatatctgcgtatccttccagacaaaacttcagccttatcttctcccagccatctctccgaatgccccagggcagaagtagcacacttttgtacttccctctcagagtgctcaggacacagtccagtattaagtaatgcacacagtgcttctcccagtaaagtttgagttcctggagggctggagacatgtttgatttatctttgtcatttctaggacatgagaggctctcaataaatgtggaatgaattgataactgactaaataaatgacaccagtctgaaattcctaactaaagttacttagagatcatttttcccaacctggttctccccttcacttgctgtgtggcctttggcaagttacttaacctctctgtgcctccatttcttcatctgtaaaatgcagctaatagtagaaggatatatctactttatagggtggcatgagcatcatctgttagtgtaggtaaagtacttagataagtacctggcaaataataagcactcggtaaatgtcagagtttacatgcacatgcccagagatgcatctgactcaccccacctctgtccccacccacactgctgtgagggttggctgctgatggctctacctgcagcctttctttggagaattactctcagccaaagggagcagcctcacctaaagggttactctgtgcagctcatggtcaatgactgatgacctacggtacaaaaggttgcccccctgcatcaacttgatgacctgggatacaaaaggctggccctctgtatggacttgatgtcctggagtacaaaagcctgccccctgccttaaagtagcaccaacttcttagggcgagctgtgctcccaaggtcctctttgcagcaggctgaagctagtctccaacccagcatcccttcacccttccctgtcctgctgcctcacttcctaacccctgagggcacctcactcagtcgcttgaacaggaatacctgtctcaggctctgactgtaggtagcttggttgagacaaccactgtcaccgtcactatcatcagacaggaggaaatgagacccagagctgttaactggtttctccaagacccaaggttaggaacacgagttggaggtagtcaggcattaactagaagttcatttgttattttagagtagtgctggtttttatgagtctccaatgagccttttctaagaaacaccgactgaataaattaaccaacaatcagcttgaaaaacacaaactaagttaccttaggtaggtacagaaggtcacgacaaaaaggaatcaatgggaaaggaaaacatgacgattacatgccttcgtgggtggtgaggacagcgaggacagcctttgctgagtcctgatcccctgagatgagaccgaggtccaggccaagcgggggacccctcaggcctgcggcataggtaaggggtggcaaaacggatcacaaccatgtccctgcttgcctttgccttaccatgatcccacctatctagacacaccacccctcagaactcacatcccatgtgcctccactgagtactcttcagcaattccccaccacccccaggacccccagctcaaagccatctccatttgataatcccatgaaggtcatcaaatgccatccttgcttaggtcagcccattacactggactatgagggctttgaggacaggagctgggacttggatctttgccttaccccagaggggagggaaatgaagggaaagagaatctgacacacacttgtgtttggtagttgtgaggtaggaatcaagaccatgcttctccttgagagtgacagctgggagaagtccatcaacttcaggttctcccagccactgaaactgatgaagccagattctaatccaagtcagtccaagctgaaacagaccaggaaaaggaaaatcaacttcagcaaggcacttaaagacatttgctgtaattagatggacattttgatgggaaaagaggctgatgggaatgctttgcagggcttaatgcaggagttcttgttctttctcagtgtaaaagtgtttttttccttccctggttacaacactagcatatacttgtgaaaaatctgaataacacagaagcgtataaaacagaagatattagtgcctgatattctctctcatcctctgcaatacctactgttaagagtttaaatatactggctgggcgtggtggcttacccttgtaatcccagcactttgggaggttctttatttgttaaggacttcaaatcctttgttgtgtacagtgcaaatatttttcttcaacttgaatatctttcagtcttctttatggtatcctctcttgaacagaagtttaaaaaatttttttcagagtggtaacatttattaggaaggagagattttagtgagatccccatgtgacacacagaagaaacagaaggtaactgtcatttctaaacaggaaggagaggagggtctggactcccaggggacaggtagttcagctggacaatgggggagtatgagattagggtggatgaagccactgttcaccacccctccactgaagttcagtggctaaaatattgtgacaccagccagccagtggaaagctgtcctgctctccggcaaacatgggatgttgttggtggcaggaaggaagaatgtcacgctatatcttgctgctcctccgggctactttgccgttactaacagggctgaagggtcaggtgggcctgcaggtgtgtggttggcctggcttcgaggggttctggtactgggggggtgggacggactatgagggggatgtgggccactaccaggaccctggtgggttactagatccattcccattctggctttcagaggctggagaagcagcagggggacgagtggtaggctgggaagctgtagggttgctgttgttctgcagggttgctgtctttctgcaccaccttgttgggcgcctgctggttgctatactctgagtttggctcattgaagttaggaaatcagaataaaccatacagaattctccagtcttctgtagatcacccccatggccagtatactgtgtcagacaacctttgaaaactgaagcgcaccctttgttgagccagacaacgtccccaggctggatcagattgccgatgtcatcacagacggagatattgaggctgcccattttgtctgccactttgcaggtctgaaccttgtgcccctcctttgtcttggcctgtctccagcacaataacgataagcttcagactcctgagcctgggcttgatatccttcacaaaggtctccgtcatgcaggcagagccaaccaaaccatgtttttgtttgttagcttgtttctttttttttttttttttttttttttttttttttgagatggtgtcctctctgtcgcccaggctggagtacagtggcacaatctcggctcactgcaacctccgcctcccgagttcaagtgattctcctgcctcagcctcccaagtagctgggattacaagcgtgcaccaccacactccactaatttttgtatttttagtagagacggggtttcaccatgatggccaggctggtctcgaactcctgacctcaagtgatctgcttgcctcggcctcccaaagtgtaatctcaaagtgcttagattagaggtgtgagccaccactcccggccttaaatttttataatgtcaaatttatctagcttttatgtgtttgggttttcatgttatgctggaaagacttcttgttcataaattaacaagatcaagagttttggaatggaaattgattctagcatgtgtggaccattatgctgaattttggtggacacataaatacctttatcaggcaagctatttttaaactctgtaattacaatttaatagtaggccaaataatgaaaaaaaagtattatagaactaagagctacatttaattaaaagtgaatatctttttaggctgaggcgggaggttggatcacttgagcccaggagattgaggccagcctgggcaacagagcaagacctggtctctataaaaaattttaaaattagccaggtgtggtgtcacaggcctatagtcccagctacttagtaagctgaggcaggaggattgcttgcttccaggagttcaaacttgtagtgaactatgattgcatcattgcactccagcctgtgtgacagagcaagatcctgtttcaataaataaataaaggggggattacataatagcacaagtaacaaaaatttccccccataattgcattcttctgaataaccacagtttatattttactatttttctttccagtcttttttctagtcttgtgtacttacatatattttttaaacaaaatttggttcatattcatctggaatggtcttttttcactgaatatcagattgtgaatttgtgggaggactgagtaactgttgtatactccattacaaagtctatgattgaaatctagtagtatttgttaactagagaaagtcttttaagatgataagatatataccaaacaaccttctttcttctttctaaaatggctccatcctttgatcttttatcatccacacttattttgttttagcggcttctgtacgtaactgttgagctgtgttatcttggaaaggtttcatgtctacccactcccttttcacatttttaccatgcctttcttgaaaatcacattttagtgacgcttcttagtgatttttttcttctctcttttttcttcttctcttttttttttttttttttttttttgagacaaggtcttgctctgtcacccaggctggagtgcagtggcacaaccagagctcactgaagcctcagactcgtgggctcaagtgatcctcttccctcagcctcccaagtagctgggactacaggcatacaccaacaatgcccggctaatttttctgtttttttgtagagacagggtatcactatgttggccaggctggtctcaaactcctggcctcaagcgatcctcctgctttggcctcccaaagtactgggattacaggcatgagacaccacgcctggccctgagtgcctttgcaatgggacacggagacagcttttgctttgtgcggcttcaagttttgtataaatctcaaactattctatgttccgtggatgtggccttccatctcatcccatttcagagatactcttcattccactggatcgctaacttctcctgagtgcctcctgatatgctggtcacaccactgtcatcctccatttcctgacaaatccaacaactgctgagccagaacagccacgtgagctgaattgtgcctggtggtcacagtagaaccacagataatgcagctagatggcgctcacatccacacatttctgaggaattaggcggcaatgttcaagatgttttacattagttcccagccttgagtttacagtcttgggagaggaggaccagtatacttaggcacatgaaatatctgcaaagtaatgctaatatatgcattttccaaatgaaactaacataaaatgagtacagcatgttggttgctcctctaagccctaaactgtcctcccagcacccctacgacacaggtacagtacaattacatctttcctttaagaggaggcactaatagatttagtagttttcccaaggccacaggggcagaggcataagtcaacccaggtagctcgctccaaagccacacttaatcacaatgaactggctcaagaaaaaggagaatagaatgacatcaaaccaacagtggtgacctgcggggagtcaggtgtgctgggagactacactatttactttccacacaaagctctgtattgttgaaaattctgtccccaggcataaactgtcatgcttttaaattcaatactttttataagaataatataagagcataaaatactactcaactgtggtcaaaggctaattcaggaattgtgggttttgaagcttgtttatggaggaaggagactctaaggataagaattcaaaatagaaatacaaaattacatataaaagtaaatatttatggccaggtgcactggttcacacctgtaatcccagcactttgggaggccgatgcaggaggcttgcttgagctcaggagttcaagaccagtctgtgcaacatagtgataccccatctctacaaaaaagttagaaaaactagctgggtgtgggatagtcctagctagctgggaggctgaggtgggaggatcacttgagcccaggtgttggaggctacagtgggctatgattgcaccactgctctccagcctgggctgcagggggagaccctgtctcagaaaaagagtgaaagtttatttagattgaaatatgaaatcgtaacaaattacacatttttgctctttttttttttttttttttttgagataagatctcactgtgtcacccaggctggagcacagtggcactatcatggctcaatgcaacctccacctcccaggctcaagtgatcctcccacctcagcttcccaagtagctgggaccacaggcacccaccaccataactggctgatttttgtattttttgtagaggcagggttttgccatgttgcccaggctggtctcaaactcctgagctgaagagatccacccacctctgcttccataagggctgagattacaggcgtgagccaccgtgcccggccacacatttttgaaaagtgacaaacaccacaaatataacaaaatcctgaaaaatgacataacctctacaatattttttcctattctttggctgcatacttttcatatgatcatctcgtcacataacaactgtgcaatatcattttcatgtaaagaagacaaagcaattcaaatgcattttaaaatgccattatgttggatagagctacataattgtttaattgaattctccctctgctgtgtacaataacttatggatgaatatgcttgggagctttgtgacaagaacacttagggtgctttgctgtgattttagtgcttttgaatgtttttttgtctggtgttgccaggtttcatcaggacaagttatatcagatatgctaagactgactcaatatgttggtagacataaaatgcagtttggcatgcataaaaatgatacttcacagtttatagtattgctacagctttgtgctctacaaacacgagaattctaatcaattctattttgcattgatttctactttaaaagtatgatagtatggtgcattataattgtatataccacatttctgagtattttcctgaagataatttctgtcttgactagacatcaatgagaaccaaatatttcactcataattgtgtacagctgatgattgaaagaacattccacagattagcttctcattctgcacattttaactcttgcttcttcttcactcccacatgcttccagtgtcaggcatcataggaaacatttaaatcataataagacccatgatgccacagagcatgcactgagcaagagggttcctggaagcctagaatacccaagaataaccaacaatttctcgactctacatggaagtgtgaaccatatatatagatcccactcgaccaaaacaaataaatctccaactcaacttctccttagctggattccccaaaatgctcatgcctctccatcaccacacaactcctcaagggaaaagtgacgcaggggcaaacagagtcaacagcatccttagcttatgacagttaaaatcttacttttacatttttaccaaaagcatgtgaccatgtgaacccaagcaaaggtgcttctgggatcttggaagtcattcttataactagcaggtcctaaagcttaagctcctttctagaaaatctactctgattgtggtgaagacgaccattgcaacaagagccacgctcacggagaaagcagtgcgtactggagttgtcaagaaaaacttcttgtaggagacaggcactgagcaaggccttaagtcattggtaggatccaacaaacagaggaataggatgggagtctaagccacaaagtttctgcatctgccaaaaagtagatatgcatgtatgtggatgtaaaacgtgttttcctgccaatgaaaacatttttccgtcactggcttagagctacctaataagagccaatggcaatacatttacacatcactaaagaatgagaagtgaactttcttcccggtcccctctccccatcaccatcagcaaataatcactcccaagccaagattaaccagagctgcaggcatttggcacacatgtggtccccatccacctcttccaacctgggatccaaaaaccctggatttacaccccaggcaaaagagagactggcctgagactaagtcttcggtggtagatgcaggaagcaaagcctggtggatgccagtccaatcagcgtgaggaaggaagattcatgcccagttctcacccctctttcgcttgaatatattttgtgccattacctgcaggaaagggggaagggaaggaatgtttcccgccagaggcagcagctgtcccctcatttggaagactctgagttgattttggccatgtccttctgcctgtttctttaacatgctgcattaagcctcagctttgctcctcttgctcctgaattctgttttgaaatatcagagaaatgctcccaggaggactttgaatgtgagcactctttataggctattttaaggagctcccagctcaggccagggtcaggcaacaacagctaaacccaaactcatcagcaccatggtctacccaggaaagcacaaagactcaaatgtcactgagttcaccaccattcgtttagcacctactgtatgccgggagtgctcttagaaattagggtgataatcctaaaccaaaagaacaaagctggaggcatcatgctacctgacttcaaactatactacaaggttacagtaaccaaaacagcatggtactggtaccaaaacagagatatagaccaatggaacagaacagagccctcagaaataatgctgcatatctacaactatctgatctttgacaaacctgacaaaaacaagaaatggggaaaggattccccatttaataagtggtgctgggaaaactggctagccatatgtagaaagctgaaattggatcccttccttatgccgtatacaaaaattaattgaagatggattaaagacttaaatgttagacctaaaaccataaaaaccctagaagaaaacctaggcaataccattcaggacataggcatggacaaggacttcatggctaaaataccaaaagcaatggcaacaaaagccaaaattgacaaatgggatctaattaaactaaagagcttctgcacagcaaaagaaactaccatcagagtgaacaggcaacctacagaatgggagaaaatttttgcaatctactcatctgacaaagggctaatatccagaatctacaatgaactcaaacacatttacaagaaaaaaacaaacaaccccatcaaaaagtgggcaaaggatatgaacagacacttctcaaaagaagacatttatgcaggcaacagacacgtgaacaaatgcttatcatcactggccatcagagaaatgcaaatcaaaaccacagggagataccatctcacaccagttagaatggcgaccattaaaaagtcaggaaacaacaggtgctggagaggatgtggagaaataggaacaattttacactgttggtgggactgtaaactagttcaaccattgtggaagttattgtggcaattcctctgggatctagaactagaaataccatttgacccagccatcccattactgggtatatacccaaaggattataaatcatgctggtataaagacacacgcacacgtatgtttattgcggcactattcacaatagcaaagacttggaaccaacccaaatgtccaacaatgatagactggattaagaaaatgtggcagatatacaccatggaatactatgcagccataaaaaatgatgagttcatgtcctttgtagggacatggatgaagctggaaaccatcattctcagctaactgtcgtgaggacaaaaaaccaaacccacatgttctcactcaaaggtgggaattgaacaatgagaacacatggacacaggaaggggaacatcacacaccggggcctgttgtggggtggggggaggggggagggatagcattaggagatatacctaatgttaaattatgagttaatgggtgcagcacaccaacattgcacgtgtgtgcatatgtaacaaacctgcaggttgtgcacatgtaccctaaaacttaaagtataataataaaaaaagaaattagggtgatggagtagcttagggttccccaactcctcctttctttgcagatcataaatgtgattaccctcttttggtttcccctaagtttatgtttaataagcttgtaatttgtctttttcccacattccccatcaactctagaattcagccggcttagttcccaggtcatcctcagctgggtgggggtggtgattgctcacttgtgacaaagcatcctggcgctgattgactggctcagtgtggggtgtgaatggggtcctgaacacgggcaaacggaaagagatggttaagaaaccattaacaagtgccaagtcaaattcatttcagaatatagttaaagtaggaatctaaagtgctatctttgcagacagacaaaacccttgattgaataattcttgccttcccctccctttgcaatgatcacataatccatattgaattattgtgtacctttagatccacgtccagctctctagccagtctcacggtcttcatctttattgtgccaaaatcacatggctttaacttgcagggttggataatttcttctaaattccacctgcttccctatacccccttacccactcccttgaccttttctggaagataagaacaagttgaggaacttgcattttacataggaaagcaatgtttatggccctgaaataaggggcatgctcacagccagtattcaaaatgtcttgttgaaataagctcaaatacaatataaagatattaccaaccagcttctctatgaattactcactgctctacaaaaatgtttccaactttcccaacacacacacacacaaatctctactgttgcacaatcctgcttgtatttttcagattggcttgattaaaactgtgtgaagtaaaattcaacctgttgacctcactcaagatacctggaaatgaaaagttggccatctgagtcattggttttattttattttgggggggaaaataaggtgggagtgtaaatatcattagataaagtttccagaaatttaaagccatgaaggagagagatcaactgggatttagggattatttatttatttatttattttgagacagagtcttgttctgtcacccaggctggagtgcagtggtgcgatctcggctcattgcaacctccatctcccaggttcaagtgattgtcctgcctcagccttctgagtagctgggactacagatgtgtagcaccagaccaggctaatttttgtatttttagtagaggggtttcgccatgttgaccaggctggtctcaaactcctgacctcaggtgatccacccgcctcggcctcccaaagtgctgggattaaaggcatgagccaccaagcccgatctttttttttaattaaaattaaaattttttaaattctaaatttttgagtttagaagcacaaaaatatattctgtataataagctcacttatgaacttattatatttggcatttccacagatgtgaaagtttaacttaagaggacaaggcttctcccatccttatgtgggttgagagccaagaaaacccctaaaactcagtcttttctaatcaaacttttctgattaaaaaaaaaactctaaaattaagatgattcccaatgatccaatttaattctggatctttttcacaataggggaccctttgtcagctgtgacataaaccagtctatttccagcctgagccatctatgctgcctccttaagagtgaagcctgcctacactttgagaagctgaatacaaactgaaggtaactgagggatctctgggacctctgaaatcctggataactttctctaaggctggtttgtgattggagaaagggtacaaatggtgcttgccccagcagtgtgtctcaaacattgagatgcagtagaatcgtctattgaattagactgacctggagtggagcccaagtgaggaacttttttttttttgagacagagccttgctctgtcacccaggctggagggtagtggcaagatcttggctcactgcaacctctgcctcctgggttcaagtgattctcctgcctcagtctactgagtaactgggattacaggtgcaccaccatacctggctaattttttatatttttagtagaggtggagtttcaccatgttgaacaggctggtcttgaacttgtgacctcaagtgatccacctgcctcagcctcccaatgtgctggtattacaggtgtgagacagtgtgcccagccccaggtgggggaattctaacagattccctggatgcccccaagtctaagaagcccctactacattacagcctcctccaaggcagagaggagccttgtttcattcatttttgtatcatggggcttggcaacgtgccaggcacataataagctcttaagaaatacatcctaaattcatcagaactggtactaaactccaggtagaataaaaaattttaacatttttttttaccagaaaatatgtaatcggaatagcttctaaatactggcaaacaacaacaaaaggatactcttactttgatttcaaagaaaaaaaaataagaaaaaattcacaattggcattgctacaaactcaattgctgttaggaatcactaaaaacaagatactttcatcctggctaaagcaaaaacacatcaatcgctctgtttcacaaaagtcagagcagggggaaacatcagacaataaatagactttctgatatataatatttaaaaaagaaaaaagtcccccttgagactgcagccatgcctcagttctttcccgcctcgtcaccttcctttcttctcccctgctctttctcctgcttactcacttgccgtgctccctgccagtatctctctcctcatcctcagttgtcacacttttcttatcttctcaggagccattaatgactgactccaatggtatgagtgggcggtggaaaagatgaggccaggactgctgagagagcggaggaaacagagccatgggggttcctgaaggagccagaacttgagtgtgaataagctttagttttgcagaacgcagagggggagacatgctaacctagaacagcaatttgtaaacacgtccatgcctttaggaaacttactgtttaaacaggccttgtctatcagatttaattcagttaaacaaaatttcatgaatatagcagtgatggttaagaacattgcctccctagaaaaaactattttaggctgggcatggtggcttacacctgtaatcccagtactttaggaggccgaggtgggtgggtcacctgaggtcaggagttcaagaccagcctggcaaacatggtgaaaacccgtctctactaaaaatataaaaattagttgggcatggtggtgggagcctgcaatccaagctacttgggaggctgaggcaggagaatcacttgaacctgggtggcggaggttgcagtaagccgagatcatgccattgcactccagcctgggcaacaagagtgaaactccatctcaaacagagagccaaatcatgactgaactcccattcacaactgctacaatgagaataaaatacctaggaatacaacttacaagggatgtgaaggacctcttcaaggagaactacaaactactcctcaacgaaataaaagaggacacaaacaaatggaagaacattccatggtcacagataggaagaatcaatatcatgaaaatggccatactgccgaaagtaatttatggattcaatgctatccccatcaagctaccattgactttcttcacagaattagaaaaaactactttaaaattcatatggaaccaaaaaagagcccatatagccaagcaatcctaagcaaaaagaacaaagctggaggtatcaccctacctgccttcaagctatactacaaggctacagtaaccaaaacagcatggtactggtaccaaaacagatatatagacgaatggaacagaacagaggcctcagaaataacaccacacatctacaaccatctgatctttgacaaacctgacaaaaacaagcaacaggggaaagattccctatttaatagatgggaaaactggctagccatatgcagaaaactgaaagtggaccccttccttacaccttatataaaaattagctcgagatggattaaagacttaaatgtaagaccataaaaaccctagaagaaaacctaggcaataccattcaggacataggcatgggcaatgacttcatggctgaaacaccaaaagcaatggcaataaaagccaaaattgataaatgggatctaatgaaactaaaaagcttctgcacagcaaaagaaactatcatcagagtgaacaggcaacctacagaatggtagaaaatttttgcaatctatccatctgacaaagggctaatatccagagtctacaaggaacttaaacaaatttacaagaaaaaacaaacaaccccatcaaaaagtgggcaaaggaaatgaacagacacttctcaaaagaagacatttatgcggccaacaaacatatgaaaaaaagctcatcatcactggtcattagaaaaatgcaaatcaaaaccacaatgagataccatcttacgccagttagaatggcagttattaaaaagtcaggaaacagcagatgctggagaggatgtggagaaataggaatgcttttacactgttggtgggagtgtaaattagttcaaccattgaggaagacagtgtggtgattcctcaaggatctcgaaccagaaataccatttgacccagcaatctcattactgggtatatgcccaaaggattacaaatcattctactataaagacacatgcacatgtatgtttattgctgcactattcacaatagcaaagacttggaatgacccaaatgtccatcgaagatagactggataaagaaaatgtggcatatatatgccatggaatactatgcagccataaaaaaggatgagttcatgtcctttgcagggacatggatgaagctggaaaccatcattctcagcaaactaacacaggaacagaaaaccaaacaccacatgttcttactcataagtgggagttgaacaatgaaaacacatggacacaggaagcggaacatcacacaccagggtctgtggggaggtgggggataggggagggatggcattaggagaaatacttaatgtagatgacaggttgatgggtgcagcaaaccaccatggcacgtgtatacctatgtaacaaacctgcacgttctgcacatgtatcccagaacttaaaatataatttaaaaaagaaaaaaaactattttaaaattcatatggaaccaaaaaagagcccaaatagccaaggcaattctaagcaaaaagaacaaacctaatggcatcaagttacctgatttcaaactatactacagagctacagtaaccaaaacagtatggtactggtacaaaaccagacccatagaccaatggaacagaataaaaggcccagaaataaggccacatctacaactatctgatctttgacaaagctgacagaaagcaatggtaaaggactccttattgaataaatgtgctggaattactggctagccatatgcagaagattgaaactagaccccttccttataccatatacaaaaatcaactcaagatggattaaagacttaaatgtaaaacccaaaactataaaaaccctggaagacaacctaggcaataccattctagacatagaaactggcaaagatttcatggcaaagataccaaaagcaatctcaacaaaagcaaaagttgacaatagggatctaactaaagttaagagcttctgcacagcaaaagaatctaccaacagagtaaatggataatatacaaaatagaagaaaatttttacaaactatgcatctgacaaaaaggtctaatatccagcatctataaggaacttaaatttacacggacaaagaaaaaaaaaaaattaaaaagtgggcaaaggacatgaatagacacttttcaaaagaagacatagctgggcgtggtggttcaaacctgtaatcccagcactttgggaggccaagcagggtggagcacttgagcccaggagttcaagaccagcttggccgacatggcaaaatcccatctctactaaaaatgcaaaaagtagcagggtgtggtggcacacatctgtaatcccagctacgcaggaggctgaggcataagaattgcttgaacctgggaggtgaaggttgcggtgagctgagatcgcagcctgggtgacagagtgaactctgtctcgaagaaaaaaaaaagacatacaggcagccaaaaagcatatgaaaaaaactcagtatcactgctcattagagaaatgcaaatcacagtgagataccatctcagaccagtcagaatggctattactaaagtcaaaaatgctggcaaggttgcagggaaaagggaatgcttatacactgttggtggcagtgtaaattagttaaaccattgtggaagacagtgtggtgattccttaaaaagctaaaaacagaactaccatctgatctagcaatccaattactgagtatatacccatggaatataaatctttctaccataaagacacatgtacccatatgttcattgcagcgctattcacaataataaagacatggaatcaacctaaatgcccatcagcggtagactagatgaagaaaacgtggtacacatacaccatggaatactatgcagccacaaaaaacaacaagatcatgtcctttgcaggaacatggatggagctggaggccattatccttagcaaactaacacacgaacagaaaaccaaatgctgcatgttctcacttataagtgggagctaaatgatgggaacacatagacacatagaggggaacaacgcacaccggggtctactggagggtggagggtgggagaatgtagagaagcaaaaaaaataacccttgggtactaggcttagcacctgagtgacaaaatcatctgtgcaccaaaccccgtaacacaagtttacctatgtaacagacctacacatatacctctgaacctaaaatagaagttaaacataaaagaacaccaactctggaggcagactagttttcaatcccagctccaaaattgactgtctctgtaaccttgggcaacttacttctctgtgcctcagttttctcagctggaatatggggataataatacagttgatgtgagaattaaaccagcatctggcagtatataagtgttacttattatttcaccatcactgcttttcttttaaaagtaaataaaaacaggaacttacaatttagttgggggtggtgggcaggataatatggacaactcatactaatgtctcttctataaatctgattatttttgcttttgttttttaagcaagacatagcttacacagaacatataaaagaagaaatatttattgaagcactctgccaagtgctttacttaattatattaattaatcctccaaaaactcaatgagatagatatcattatccctaatttgcagatgaggaaactaaggctgggaggccttaattaacttgcccacagttccacagctagtaagttgcagggcaatgatttgagctcgagtctcattctaattcttaagtccttttgccacaccatcaagcacccaaagagtttcaaaagcagttactcactgtttttaacccacaattaaaactgttgatgtgcagagtaaaccattcctctgccaggcgtcctcaaaaccccatccagctgacttactaagaaactgaaaggtagtgtcattagagaaggtcacagaggctgggcatagtggctcacacctataatcccagcactttgggagaccaaagtgcgtggatcacctgaggtcaggagtttgagaccagcctggccaacatggtgaaaccccatctctactaaaaatacaaaagttagcatggtggcgggtgcctgtaatcccagctactcaggaggctgaggcagaagaatcactagaacccacgaggcggaggttgcagtgagctgagatcgcaccactgcactccagcctggtgacagagctgcactccagcctggtgacagagtgagactccatctcaaaaaaaagaaagaaagaaaaaagagaagattacagaaacactaggaaaatcttggttgacagcaactatctttttaaatctcccaggctgtgcccaagctctgggggatttcataaatccttagctaacttgggacacctggctacagggattcacaggaatatgtcagattccgatgtgtttattatacacttactgggctcccaaagacactctcctggagctcctattcactaaccagacaagtatgagtttgggactaatccatttatcaaatagaatagcctaaatttgtaccaggcagatgctgtgtagatttctttcttttcattgggtattcagcaatgggcaagaattttgaggtcttggtccacagttgctcagaagttcccattccccagaagcatgacagagtcttggggaagagtgactgctctgtgacttaaagaaagttgtagccagatttggataatgtccaagtctttacaactaatctcctcctcttctcttctagatgccatcaaccaaagggtgtttagaaatgtgttaataattcccaggagaaattggccaggattacctagtcatgactaatgaagctgtcatctgcctttccttcctgctgtttaataatgccttctaaagagtgctttatgaagatggatagtattataatgctgcactcaagaaactggcacaatgtcaatgaaaacagaggccagcttattttgcatgccactctatttttcattacgctccacaataacttgttattaaatgaaaatgaatttgccattagggactaggtactatttaataactgttcagcaatgtttcatgatttaatttttttttttgtaactagtgcagcagccatgtaagtaaatgtcattcgggattaaatgaggttgaattttctagaacaatcttaaaggtttcatggaacttagtcattaaaactggatgtggtttgaagcttggtttactaaatcctaactttgaattgaccatcttcaaaacaggaagagtgaggaagactctctccatgagtactctcagaaaatgacatagaaagtaagcatcgtgccttatagagaattcctagaaggggtaggggacttaccggacagcagtctcctcagtagcctccccaaagagtatgtctcaatcaagatagtcaatgctattttggaataacaaataaaccccaaattttagtggcttcaaatgataaaggtttgtttcttgcttgtgccacacatccactgcagggctgtatgtctgtcatgggttatcttgaaagccaggatgatcaagcacccactatctggaatgatgacagagggcaaaaagagctctggagggtctcaaatcagccattaaaagcttgatcttgaactggtcccatgaccccaacccaagaagtgggagagggccaagaattataattttactgtgtactcaaaaggcagaaatagcatatctagtgatcagtcctagtgggtactaatgtgagatcaaaatgaggatttcattacaagtctaaagattcaaaagtgcctcttgcattctgagagaaacctctactttcccagactcaccttttcgctgtggtcacagacatccaggcagcctcgcttctttcctgaaagtcggacgttcccatggtccctcctcttcaaggaatcagccatcccaggactcgttaacaccaagtgatctgtaactttaattcatgtcaatctggttatgtacttgaaaattgccaggatatttttgaattatcagtatcattaaagctcagacacatgtggataatgaacaatccttccccttcacctataaaaatccaaagctgacattgaatttatgctatttaacataaaatttcttggcattttttaaacaaactgtataaggactgaattactgcacaaagtattgcctgcttttcgaagactgagaccacatgatttaaatgtaacaatttttttttttttgagatggagtcttactctgtcgcccatgctggagtgcagtggtgtgatctcagctcactgcaaccttggcctccagggttcaagcaattcttctgcctcagactcctgagtagctgggattacaggtgcacaccactatacccagctaatttttgtatttttagtagagactaggtttcaccaagttggccacactggtctcgaactcccaacttcaagtgatccacctgcctcagcctcccaaaatgctgggaatacaggcgtgagacaccatgcccgcctataacaattttctacacagccatggtgtgtgtgtgtgtgtgtgtgtgtgtgtgtgtgtgtataggttttcatccatggtttctggatcataacccccatagtcttttgttataatgttggggtgctgtaggcctcagcagcaggtctcaggaaacagaatctctctctctgaccttcccctgtcctcctttcatctgcctaaggcaggactcgaaactgattgtaggtcagaagcccctcattccagaggggtccagccccataccctagaggaaggaaggctgcacagagaggccaagaaaagcctaaacacacaggccttgctgggtttagattatgtgctttttgtccaatcacatttctacatggttgtctatcatgcctatgtaatgcagtctccataaagacccaggaggacagggtttggaaagcttcaggatagtggaactcaggaggttcctggagggtgggggcctctggtggggggtgaaagctctgtggccctttccccataccttaccctatgcatctcttcatctgtatcctttgtaatattcattataataaaccagtaaacatgtttccctgggttctgtgagccactccagcaaattaatcaaacccaaagagggaatcgtgagaacctcaacttgaagccagtcagtcagaagttctggaggcctggacttgtgactggggtctggaggtggcagagtgggggcagttttggggactgagctctcactctgtgggatctgatgctacttccagcatcaatgtctgctgcttggtgtgtggggaaaaccccccatgcctttggtcacagctttcttctgtgttgatggttgtggtggtggtgtgagagcagaggagaaacagtttgaagagttttccccaaataactgaggatggtgaatacaaaagaacttgtataatttaaggagcctctcaaatggcctattaagtattctgtgtgatactttgtattaagagcgatcctcactgaatcgtgaaattaaagcctaagtgtatccttagagaagaacaactatttccgaaccatattattaacggtttccttattatattagtctgggttcccctagaagcacatcccaagacagaatgagtacaagtgattgattcaggaagtgatcccaggaagtcagggaggggaatgggacagtgagccaggaaagagcataagcccaatatggtgcacattcatgagaaggagaccactgtgggcagctggagtgcaggctaattggcaactgataactgctgggtgggtggaggtatcctaccagaggggtgaggcagccagttgtatgtactgcaatcctcatttgtcattggtgaggactgtcccctcagtcaaaggggatcatgggaatcatggaagagttgctcccaaaatctacatggagaagtacgtctgtgtagcaaaggagtggaccgtggtggccatgagaaagctcctcacaaacctccaacctcagagaatatcattgattaagggccccagcagctgctccctgaaattgatgtgctaaggcagaccctttcctggaaaatgcagggctcctcttacagcaaattgtgctcaaagcctctccaggtacctttaccaaactgcccttagactggacaggggtctagaatgcttctgcccaccctctctccttcactggaagattagatttgcattgcagtcaatggctctctctgccttttccagatccctcctcactttctcttacatgagcattttccctaataaaatattgcatatttaattccatcttggtgtctgcctgtagaggactcagattaacaaagacagtaagtgtagtgacacagcagcactttgtacatagtattgaatacaaatacattagatggatggatggtgtgatggttaattttatgtgtcaatttgactgggccatggggtgcccacatacttggtcaaatattgccctgggtgtgtctgcgagggtgttttgggtgagattaacatttaaatcggtagactgtgtagattacgctctctaatgtgggtgggcctcatccattcagttgaaggcctgaatagaacagaaaggctaagagcgaattcttcagcctgactgccttcaaactgggacatcaccatttttactgtcctcagactcaaactgagctatttgctcctccttgttctcaaggctgtcaactcaccctgcaggtcttgggacttggctgcctccataaccacctgagccaattccttataatctccctctctctctctctctcatatataatatatattatattatatactaaattatataatgtaatataaagagatttatgaggatgtttattataatttatacacgtaggtgtgtgtgtatatatatatgtaagggctcaataggctcagaaatctcacttcttatattctacaaaaaaagggtttggaatctgttgaatcaaaactcaggtcccattttgtgatatgaaacagctcatcacaaaacattttcacagcttgtttctagattttggggcttgatattcatatgtttgtgtaagggctcaatacttttatataggcttagaacataaaatatatgttctgtttctttggagaacactgactaacatagatgggtagatggatggatggaaagttggatggatggatgcatgggttgatggttgggtgggttggtgtgtggatggataaatatgaggtcatgaaggaggatatctctgtggttcagggtcatcagggaaagcttccctgtggaggaaggacttgaacttgaagaaggacaggagagaaggaggagaacactggggagtgggaggtagaggaaagaaatcatggccagcaaacgctaagaggaggcagactcagagcatttgggggtcagtgaacaaaccagtatggttggatccaagagtctgtaaataggaagagtgtgagttatatttaatgagataatgaggctgagattcgaaaccagtttgcttccccatagagtatgctttcacaccattcccttaacttccaggtgaatacctttggtcaaagaaaaagatgtgatatgtttactcttttccaaaaatattttaaagtgcagttccttcaagaggcatggaggtcacctcctcaggaaagaattccctgtgtaaccctgtgtaacataggaactctcatcatgttctatcttagcacccaacttccttctttcccaacgttgatcataatttgcacatatttatttgcatgctcattaactgactgtttttcccactcatctgtcagttccatcaagatagagacctgcactattcaccccagcacagtgccaggttgactggataaaacatggcagttagaaatgtgagatttaggactgggcacgatagctcacacctgtaattccagcacttttggaggccgagatgagtggatcacttgaggtcaggagttgaagaccagcctggccaacatggtgaaaccccatctctactaaaaatacaaaaatcaggcgggtgtggtggtgggcatctgtattcacagctgcttgcggggctgaggcaggagaatcacttgatcctgggaggtggaggttgcagtgagccaagattgtgccactgcactccagcctgggcaacagagtgagatttcatctcaaagaaaaaaaaaaaaggaaaaagatatgtgagatttaggcttattatatcctagctccattaatgactctaacagcttgaccttgggcaagtaacttcggcttcagtgtcttcatctacaaaatgaatgataatacctcacagcactatcatgaagattaaataggatagtttatataaagcacagtgccccgtacatggtaagcattcaataaaaggttgctattgtttgttattacacctcaagacttcttggtgtcatttttctgctgggtgaaattgcctctgatcaattaattatgacagacattgagaaagaagctttaatcatttgaatcatgacatctagatcaatgactccttgaactttttcgtgacagtaaatagcccttaattacttcaaaaaattgttagatccctccaacatgataataattgtgtatttttaaaactttgattgaaatacatataagaccaaaaaactctctaaattcaataatgctttaaatgtattttattggccttaacagcattgatacgtgtcttaaaaatagctggaagggatgggcacagtggctcaacgtttataatctcagtgttttgggaggtcagggcagaaggattgtttgaggctaggagttctcgaccagcctgggcaaaataggaagaccctatctctctaaaaagtttttttttaaaaaaatagccaggtatgttagaatgtgcctgtagtcctagcttctccagaggctgaggtgggaggatcactcgagccctggagtttaagttagtccgctttcacactgctgataaagacatacctgagactgggcaatttacaaaagaaagaggtttattggacttatacagttccacatggctggggatgcctcacaatcgtggaggaaagcaaagagaagcaagtcacatcttacgtggattgctgcaggcaaagagagagcttgtgcagagaagctcccatttttaaagccatcagatcttgtgaaacttattcactatcatgagaacagcacaggaaaggcctgcccccatgattcaattatctcccactgggttcctcccatgatacatgggaattgcgggagttacaattcagatgagatttgggtggggacacagccagatgtgtgtgtgtgtgagacagagcatttattcaaccagagacaatgtttggtgggcatctgggtttaagaccccataggcttacctccagggccatcccgggatctgagacccagtggggtggaaacactgattttgttgggtaactgtgcaagtcggaaaaaaacctcaccttttcctccttgtgggcttgaagtaagtgttcttccctctcatccttccaacaaggcagccctgctcagacaggtgtgtgcccatctcagacttccctcagccatctcctttagaggggctgcctgttcacgcacatcagtcatttgctcttttatataccccatcatgaatatgtgactatgactatgacttcacatcacttcattctcagaaccgtatttctgagtgcattggccagaaagatgaaaaccctgaggtgaccacacatgagcataatgtccagctaatttttgtatttttaataaagacggggtttcaccatgtgggccaggctgttctcgagctcctgacctcaagtgatccacccgtctcagcctcccaaagtgctgggattacaggtgtgagccaccacgcccagctgagatgatggcaatttgaacttctatggtgatgtggatgatgtgagagatatctggcaggtaaaattagtgggtgatagaatggacgtgcaggctggggacgggaggtaatgagattgtctcctagatccctggcttgcacagctgaatgcatggtagggcgatgcactaacataggaagcacatggacaacaacatcaaaagggaaaacctttgtcatccagtcacatgctttgtctacatgccactcattttgtcagtttattggactaattccccagcccattcactaaattgatagatgctggagcaacaatcatttgaccagctgccatggtaccacagaaagggtcccctggatgccatgtgatgaaaagtaaggaacacagatggtgaagtcagagagttatggttgcaaagctcagcatcctggttactaggagattacagttcgtgctttgctaaatctcaggttcctcatctgtaaagtaaacttaccttgcatgagtacttttaggattataggagttactgcacataaactgctaagtgcaggtgctgttcgggcactgctgaaaaatccaagagaaattgctctgctcgctgtgtgagtgcaataattctccatgaaggcagtgaatcatcgatgtgttggatggcaaggagacacactttggtgaagaatgccttttgcagagtgctgtaggtctgaaaatcaggaatgaagggtgggaggcaggaggctacaggtatctgagaggagtctgaatatattaaagaatcccaaaggagttttctcaaccatggccataaccccaaagaggtgaacttagtttattaattagcatttgcaattgtagcctaaagtctaagaaattttttagttaattaacacttgtatgagattggatatgatctacttaagaaaaaacacacacatatttttatgacagaaaatgtaaaaaattcataaaatcatatagaagaacatttaaaaataatccataatcccaccaactagaaataattactattaatattatgtcatgtagcttttcagactaaaaatactataaacactttaaaaacaaaattgtgatcacacagaaaaacaaatttgtaatctatattttaattatatcaatgtcatgaacatttttgcatactatttttgcaaattgttctacaacatgacttttaattaattaatgttttttctgagatagaatcccctatgcccaggctggagtgctgtggcaaaatcacctctcactgcagcctcaacctcccaggctcgagtgatcctcccacctcagcctcctgagtatctgggactacaggtgtgtgccaccacccccagctaattttttgtaatcttgtagagacagggtttcaccatgtttcccagaccggtctcaaacttctgggctcaagtgatctgcccgccttggcttcccaaatactgggattataggtgtgagccaccacgtacggccttacaacatgactttttaaggcacaaagtagtataacctaagtgccataatttgtttagccagtttcttagtgttggtcagttagcttgttttttcagtatctgttattgtatataactctgtattttaagttatatacaggcaaagatcttacacataacattttgtgtacatctcggattactactttaagaaaaattactaatggaattattaggccaaggcatattaacattaaagatattaaaatattaatccccccaaaagattatacaaaattcactcttgctcacaaagttcaaatgtacctgtttctggtcctacttcaaggatgtgatagcctgtttgttaaagagtatatttgggttcagagattttgaccttctctacctgaaatccgataaatatatagtgatattttcttcttgctcaattttattttctgttttttaaactctctggaaaaaaaattgatgtatgatgatgtgaacatcatttgttcattccctcactgatttagaataactcctccccctcgatctgtttctagtttgttttgtttgtttgttttttagtgtcattgacttatttgtgtgcaaaaactactatattcatcatggagaagtcaaaatatctggcagtgtagctgcctcatccccctcagtcttctttttggaaagaataaaataaaaacagaaaattacagcaaatactttgataccacctaccgcatattattaaatgttagtattttaacatagttgcttcaaacatgtttcttagaaaagaaataaaatatgacagattgattcaaagtcccttaggcttggttttcccactcactccccttcctcccaccctagaagtaaccaccaacatgaacttggcatggaaacttccaggccatgtgttaaaactttaacttcatatatatctgcccataaataaaatattgtattgttttgtgagttttcagttacataaacaatcttctagatgaattttagaatcatgccgaaatccctgtagactcttcttttggatttttattggagaggcattaaaggaatatattactttggggagaattgacatctttacattattagttttttcctctaaggactaaagtatgtttttcatttattcaagtctctactctgtcccttagcaaaacactgttattttcttcttgtatgtccagcacatttcttgctaagcgatatctttttttgtttgtttgtttccagggcccagtgtttattgctaacttacttctaggtattttatgatttgtgttgatactgagaataggattttatttttgtattataatttctaactcattattactgagatgaaagaaagcagttaactttaaatgtttattttgtaactggccatataactggattcttactatgtgtatctaatactataatttttcaattgattcttttgggttttcctggtagaaaattatacattatgtataacactaaagatttgcaaataatgataatttggtctgcttcttactgacagttacacttaatttctttttcttatctctatgaattagcttggacttctataacaacaaattacaatgatgatagaaggtgtcctcatctaattttttatgttaaaaggagttcctctaacatttaatacttacatagaatgttgactgttgcttaagacagcctttattatgttttttcttttagtataatgaacatttttcccaatctgtatataattgcaaaaacagattgatttttgaaaattggaactcaactacaatttttggtagtatttgtaaaattgaagattcaaccctcaacattagtatttttggttaatcatatgagaaggggtgttagactattcctaatcctggctttaaaatgagttaatgattttattttgatcaagtcctctcacctctctgggcctcagttttctccttgtaaaatgaagagttaagataattgctgaaagtttatttcaattgggtaagaatccaagccctattttaacaaaaacttatttttttttagtcaaacaattttacaaagtcagccacacctaataaattcacaaggctgaagaagattgaaagtggccaggtgctgtggctcacgtctgtgatcccagaattctgggaggcagaggcaggtggatcacttgagttcaggagttcaagaccagcctgagcaacatgatgaaaccccatctctaccaaaaatacaaaaattagctatggtggcatgcacctgtagtcccagctactcaggaagatgaggcgggaagatctcttgagcctgagaggtggaggttgcagcgagctgaggttgcagcgagctgaggttgcagcgagctgaggttgcaccactgcacactgtgggtgacagtgaaattctgtctaaaaaaaaaaaaaaagattgaaagcttaggtttagtacacagaaaaatgaactcaaaacaagttcaatataagtggactgtgaaacctgcataaagttcatagctgaagttctaaaaataataactactacctattgagtattcatgatgtcccaggaatagtgttttacttacaatataaactactaactgtttataacaatgaagtaggcaaaatcagttttcctattagagacaaggaaactgaggtattgtggggtaagaacgctgtagagtcactcactcaaagtccattccagcctccttctggtgtgtttccttcctatgttggattacccaaaaagctcaagtccagatatcccagactttcatgtagatagcattcctgatatgatttaggttgcatcaataagcttcattggccagagacttgattttgagacagatctaggcagagagaagtggcatgcaagactctgctttgcagattgttgtagtgcagtctggggcctacagttctgggagtggctttctaatctccagatcacagtcaaggcagggtacctggacccagtggctggaatagcagctctctgagtcctcagaatgagatggagaaggcagtcccctacacaggccaattctaatgtgtctttctggaagccattcacagatggcctgtttttccagcccttccagcaatgttgtaagcacctagagtccttctgaaatccctttctccttgaagtatctaaagtggtttctattatctgcacttgaactcagataattataagaggtgcaatcttgcttttcttatgtgccccattcagctaaaatgacccaccacacagtataatggacccgggattagatttggatcaggtaccctggcttcttagtcccagttgttatttaatagctgcctgactttgggcaaatttcttcaactcttccgggactcagttttctatctttgacatgaagaaattgtcttttctggtgttaacaatgtatgattatcattgacacagaagaaaatgtgacaccctcgatgcagatttcctgctcagcagttcctagtaagccaatgacagacctgaaaatagcaagcatggctatttcccaagtcttggctcttccttgatttaacgcatctggcagaatgccctgtggtgggcgcagaatccagaccccttcccaggtagggacttgaaccactgcagcatcaccctggggggcagggtatgacaccagcaggacttagcatcattaggaagtcactgagcaggcaagctgagagttacaaagcctgtggccgctacagatcaacccaagcaagaggtcaggaaactggaaaatgaagacaggaccacggagaattctgggggcagaggtcagtcacaagtcagcgatagaagtcaggaagtctagcctgaggccaaggaatctacagttcataaaattctggtcaaacaagcagacagggatgtggacaggcactcaggcctcattagtgaggacacagaattcacagtgcagtttaccaggtaagatgaggtccctcatccactctctccctgtccactcagattcagctaactcagcactggggccataggtttttgcctggtgtgaaaggaaactcagaaatgattattgcatcaaattgacttgaatgagttaagatctcagggatcattacacagagtaaacctggtcccagaacagatgtttccagcccccatgataagcaggaagtgttttcagaagtgagcaaatcagtggcatttggttagaatgtctggctgactgaggacaagataatgaagtgcaattgaattctggcaattgtctgggggtggggaaggggaggaagggaactggatggggtggtgggtgctctggccataggaaggtggtcttctagtgtcccaccatctttcaggaggaatgaagatacattctaacattaataatgccttcttagtttcctatcttcatgtgtacagttctctatcaactctagcccacaactccaaacactacccttttctatacctgccttcagatacagagagggtatatctttctatataccctttagaaagatttagatttagaaagacttagatttagaaagggtatatatcagcctctttccttctcagcaaagaggctgataaataaatccataataagataccaatgattaaaataacataatttgtttcccttcctagaggttgttgcctttctataggcaaggtaacaatgatgaatttagaactgtcagggaaatattacggaacaagaacagggctgatagactcttaccctgtcaatcttcattattcacagatttcatatttatgaatttgcctccttgctcaaatgtattggtaactgcaaaaccaatatttggcagggattttttcatcattcatggacatgcattgtggcaaaaaaagtgagttgcccaatgggaatgttcccagatgaggttgaacaaggcaacactttgccttcttgtttcagctcctattctaacaagtgtccttttctaggtctacatagtgtcacatttttcccatatttgtgcttcttgttagtttcactgtataaaatggcccacactacagtgtatggctgcaacgctgtctggccttttagaggacatacaaagtatgtgtgttagagaagcttaggtcaagcatgagttatagtgctactggccatgagttcaacattaatgaatcaacaatatatattaaataaggtgggccgggcgcagtagctcactcctgtaatcccagcactttggaaggccgaggggggcagatcacctgaagtcaggagttcatgaccagcctggccaaaatgtatttttagtctctactaaaaataaaaaaattagacgggcgtggtggcgggcgcctataatcccagctactcaggaggctgatgcaggagaatctcttgaacccaggaggtggaggttgccattgattgtgccattgcactccagcatggggtgcaagagcgaaactctgtttcaaaaaaaaaataaataatgtgtctgtaaacagaaacacacacaaaacaaggttacgtattgatccattgatgaaaatgttgtgaccagaggcttgaagaacctaaccctgtatttccccagaagtaatagttccctactttctaattcagcattcgcagagactctacagaacctaactacctgaataacaagaacagactgtgctcggtctccacagagcgacttgctcagcctaacgccattcctaagaaatgctcacaggggccccttgcatgactgctgcaaagaattacgatgaaaatacttggaaacatttttcaaaatctttacttcttaacctttttacaggcatggtccaaaatcgtcactgacaagccatgaatgggatggcccgtttaggattggatgtgctgttccggaaactgagataaaagcagctctgtagtaattctgtctgaactgctttttctgtccgaaatgatttttatgtcctcttcaacagattccggatgtgaatgcaacactcttaaaagaggcacctaagtaaggaataatttcactaaaacgtttccacatagacctcccaggtggaatcctcagcaggaggtttggctcagggcagaaatgcgttgatggaggtttccagagggcgctgttcatcctactctggcaaattggagggggtttattgatttatttatttattttgagatagagtctcgctctgtcgcccaggctggagtgcattggcgcgatctgggctcactgcaacctccgcctcccaggttcaagcgattctcctgcctcagcctcccgagttgctgggattacgggcactccccaccatgcctggctaatttttgtatttttagtagagacggggtttcgccatgttgctcaggctggtcttgaactcctgacctcaagtgatccaccagcctcggcctcccaaagtgctgggattataggtgtgagccaccatgcctggccaagagagtttaatttggtcaccaacagagggaaatctttctttggcatttagtacgaactgtttctgtcccttgaaaaactattctgactggaattgcaacctgacaatggcctggcaagaatcaatccaatgacaccaggacacaactgcccctatagaagcctggtaaagcttcattatccttagaagacacagcctacaacaggaatcctgtgtttatttttaagcagtagtaccagataggtcacttctcaaaattgttagtgcaaatgtcagctaaaagttttgtttttctggaaggaaagcatttcaaggtgacacagagtccctttctcctgtatttttcttttcagctaagtgttgcgaatttcttttctttgcatttaaattcatgagataaaaagaaggctccctccccatcattcactgctccctagactcgtaaatgccacatattctgaacaccacatctcggacacaaatttctcacagaaaagagctgaaaggcctctcagtgaggcctccgccagctgaggggccctctcagcccggcctccctcagggccttcccagcgcctctgcagctccaagcacagcggtttgtgtggctgagcctagggaggaatttgtagctggggactggggtcacgggccttccggttttctacttagtgacacgctttctcacacaggggtcaagagttagggcctcaccagtgcatccttcaagatgagctgctagaaatgttttcttaataagagtccttttctttcccttgagacaggagggtttgaaccctaggcctttcaatccctcgacagaagctataaaccacaaatgtgcttcatgttgaaaggacatgcaagtgaccagcactctcttctgctttctgcccctacaccccccgcctgtcatatgtgccgacaacactctcttctcttcctcagccgactgctcgggcagtctgcccattctggtggggaaagaagagggggaaagcttcctctgcccccagggggccatcaggaccacatcagctctggcgggtggtctctagcaggccttttctcagcccctgcccctggcaccagacatgtgcaccattctccgcttgcttgtggatgacctgcctgtttaacacatcttctaagagttctgtctgagaagtcacatttgccccgttgctgtgaggcagaaaaacccagccgctgctctacggggagaacaggagaaccagcccagctctggagggacggctgaaccggagcacacccacacttgtgcttgcccctaaagccagccgatggagatgaatttggaatgttggaacatatcacagtgcagattttcttcttcttctttttaaaaaatttttttgcaaatatttttagcaagtgttaaaatgtgtgtgtgtgtgtgtgtgtgtgtgtgtgtgtattgggattttctttttttttttaattaatttatttttttgagacagagtctcactctgtctcccaggctggagtccagtggcacagtggtgtgatcttagctcactgcaacttctacctcttgggttcaagcaattctcctgccttagcctccagagtagctgggattacaggcacatgtcaccacactcggctaatttttatctttttagtagagacagggtttcaccatgttggccaggccagtctcgaactcctggcctcaagtgatccgcctgcctcagcctcccaaagtgctgggattacaggcatgagccactgcacctagctgggatattctttatttaaaaaaaaaaaaaaaaaagcctgaagaaaatgcaggagggtagagacaagaagaggccaggtactcagctaagcaagtgagggcaattcttgacctccaatgctcagtccccctgctgtcttgattggcacaggatgtgaagggatgatgagaggatggctaagagcagtgagggcctgagcaggagccacgagctctgtgttgctggatctgaagtcccgagcctgggccttcaccccataccccgcccctgcactgactctaccccaatctgcctctcactctcccagctctttgcaccttgtacttcccagtacaagctgaaagagcctctgatggctgtcccggatgtcacagggacacacaggtgtggctggatcagggaggacagagcggcagtctctgtggtagcatctcaggcatgaggaaggttcccagttctctcctgggtcctgctcaggttcctgccacctgaaattctctcctcacaacttctgtcttgtgacttaagcttataagaatttgtcttctcgaaaaatgcaaatgttctcaggatgggatagcactttaaaaattatgactacggagatcttatcatccaaacaccaaatcagaatattttacaaagcacatttcttatcttttttcactggatgaattttattttctagattttttcctatatcaaagcaagtcataaatgttatttaaaaatttaaacaaacataaaaggaaatctactcctagctacacatcatttccctggcatctacttcacgagaagtataaccatggttaacaatgtgtggttgtccttctagatgtttctctgtgtgtgcatgtgtgtgagtgtgtgtgttgttgttgtttttaacaaaaatgttattccacattacatactgctgtggtatttgggttttttttcccccattggatacactagaaacatctttccaggaagaactttttttcagtctataaatattgcttgaaaaatcttcaaaagttacatttcattactatacttttagaagatcacaggtttttattgtttgtttttgttatcattcttggcctttattaaacagagtaaaattataagaagtcagggattgtctagggcagtgttgcccattcaggctttgtgtgatgctggagatgttctttacctgtgctgtccaatacagtagctggcagccacttgtggttgctggatacttgaaatgtgatcagtgtgactgagcaactgactgtacaatttgcttaattttaattaatttagatgtgactttcaatagctgcatgtgactcgtgactactgtattggatagcatttttttttggacaaatcgatcatccactcccaaaggacttatagaaagaaactttgaatccaaatgtcctggatttgaaccctaattccttctacttgccagctgtgtgactttggataacaatagaaacactttattgggttgttataaggattcaatgagttaatacttgcaaagcaattgaaccagtgcttgaacatgccattagagctcaacaaatattaggtatagaattctttcctgagaacaggaacagagaggaaagaaaactttgggtggggaaggggagaaggatggagaaaggaagtagtgagtgaataaaagggtgctttattcccacagtaagggtagggcagagtgctaccaaaccacaatagcctctcaatattgcatagagcttaccttgactgcagtcttaaaaagatgagggaggcaaaagtattgcctggaaagtcgattttttcaaccctttataaaattcctcttttctcttcagctctttattaaattatgatagggttgtgagcagctctgcagggcacctcccctgcagacctgcctgaaccctgcccagggccaggccagacaaagctctgctcaggacagccactgattcactctctaagcccaggtggctgcacaggcctcccagagcctgtggcaaacagcaggcacagtgtctccagcccccagggcagtccttgtcctgcatctgtttttaaggctaatcccagcaaagggtgagaaagaagaatctaactttgtcacagaagcaggatcctccttcccaaggaaaagtggagtctgtatagttagactaagttgatgaagtgaagcaagtatttttctcgtgggctgtttaagaggagtttactgattcagactgcaggcccctcctgctacacacacacaccacccccgtgtctaggctgtctggaatgtgtttctctggttatcaccacctcctgagacactactctgagcagcaaaatcaattgacttatttgtctctctaacccctgcccactgagtgattcatgaatgatttttgaatgagtccttaaaaatccatttctatcacgtatgttctctgaacactaagcatctttaacattaggaacaggatttaaagcagggggtatctattgtgttatcagtcttgagttagcacagattgtaaaatgcacccctttcttagggaaaggcatcaacactaaaccggtcattgggatgcctgggttcaagccaagattgccctccggcatgaatctcaacttcctttttttggtaaaatgtggcagagacacaggtgaccttcaagatccctcaaacttacacacattgtacactgccccaagctctcagggttgagaagatcctccccacctggcgccattttcccagccaggcagccctttttcaagacttgccggatattgttgctcttactgcagcttctgaaaaaagggccagttattccagtggcacaacagaaaggtccacaacggttgtcttctatgggagccaaacccatccctccaggccctagctacagttccgatcacctcagttgcttttgaggggggattttcatttacaaaccctattcagaggctttttggatgccttctgtcctggtgcaatgaagcaggctgcctttttttccaccaaatgtcccaaagggaaatgacattcaccaagaatttggacaaactttttgagaagaagaaacagtgtgaaaattgcacagatccttgttacttaaagcatttgagaagaaaactgcaggaagtagtagattcgggacataaaggacatcatttgcctgccttattatctcatttttcagtgaagctgacaggacagctgcctgttattacagggcacaccaggaaatgtttagctgccaaacagaaaagaacgagtgagggattaacagccctgttcatgccacacaaatagaattcttgcacctggtagtcacgcagttagatttattatttcatagggtatgttacttaaatcccatttacaaagaaacaaaaacaacccaaaaaggcaccttaatgatactgtaattatgagaagtattagtaaccattttgcagtttttagtctagattaaattaattggtggtggttttcatttaatcacactaatcttttatttggtttctataatgtcgcaaacttactattctatgttgcaaatctaaagcgttcttaaaaatgaaagatcgataacagtttaatcctccacaaggctgctctcattaatgatgttgtgtaacaatagagagctctttgcaaggtggcagatcacctacagaagtgagatttcaaaaaaggaaataatttccatctcagcttcatttctaatattaggaggtagaggggacagttgggggcagccaactccttgagctgctatcagagatcagagaggctgcaggggggatggcagggctcctaaatggcttttttgttcccacccagagtgaattcacttccctcgtgccaaactccagtaaggaacctgacgagagaaaaagtttaagatcctgtgaaaaccaccctttactatcactgatcatgtactttatcagatgattctttgaattaattaaaaacaaaactcctcttggagccttgctgcttaaatccttaaagcattagggtagaagcttgagactgttaactcttcattttcctgtagcatctgttatggactgattgtgtgtatccataagattcataggttgaaatcttaactcccaatgctatggtattaggaggtggggactttggaggtgattaggttagagccctcttgaataggattagtgctcttaaaagaagagacacacgagggttctctctctctcttttcctttctctctcattctctcctctccactatgtgaggatacaaagagaaatagccatctgcaaaccatgaaggaggccctcaccagaccccggatcagtctgtcccttgatcttggacctcttgaggctgggaaggatccagattcagatccttccaagcatccaaaactgtagagtgagaaacaagtgtttgctgtttcagccagccagtctgtggtaatttgtcatagcagctcaaactaagacaacatctactaaggcctctctgtaccaaccctagatattaaaaaatgagtccaagtctgaccctgtaggggctcctcacagtcggagatcaccaactcttcttggagatgtcaggaatgtcttagttttcaagggcagtattagtttttcaggtgggcaggagtcaaggacatcccagccagaaagaaccacaaaaagggcacgcaaaaggcttgagaggggaactgttaagtagtcgggtgtgactagaacttgggtggctatgggtgaatgaagggaggggaggctgagccagcacccagggccttaaatgtccttttaaggggtgtggtctttgcccccaatgtgatggagcatcataagcagcagagtaatatagcttcgtgatgactgggaaatttactcctacggcacaggggaagatgaatttgaaggaaaagatgcagacgatgggaagatataggagactcaggatagtccaagtaggagatgctcaggtgggttagcagtaagagtggagaagaaagaacagttcccagagagctttgagacatagctttaacaagacgccaaagggatatagagaagaggttctagatttttctccttggacatatgggtgaagaatggcaccactaatatagatgaggaactcagtagaaatttagattaaggaatgagggaagagtggatctgctccatttgagcatgataagtttgaggaactgtggcctgtgtaggtggagatgtctggtccggtagctcagaaaacagtatgagcattcaggcaccagagacctggtgcataaagggagttcaggaagcacagatttgggagtccttgttagagctctcttgtacttatctgaacagagatagtggttgagtccaccagattcagtaaattcactcgaggactgagtgtgcactgagactaaacacaggctgaataccaaggttagagacaccactctaaacttgtacatagaaagagccagcgaaggacagcaagctggaggccagaagctgaggagaatcaggttttcatgaaaaagaatgtgagcagccacgtcacctgccagccaggccgtgtccgtgaccatgggagttggcaatgaggaggtcatcgatcatcctggcaagcggttctctctcttgaggtgcacgaggtgggaggtggggtgcccggtagggtacagtaagggcactgagtaaaagagctgaatttcattgggatgaggagagaatagaggataagagcatggagaccacaaacagagacttgcttttgaagactgtgatagaaaaaaacaaatatccacaaggagatacaaaattatggaaggaattttttttttttagatggagaaaacctgaacatgtgtatgaactactgggagagaaccaggagacagagagagatcagagatggaggaaaagacaaatcagtgtgtaggtgtggcagctggccttatactcctgctgtaaaacctgtctgtggggtcagaagtggcggtgctgggaagagagtggctgaagcgctgggtgactgtgtcaggctggctttgcacatgctgatgctcttctccctgtcacaagggctccccttcatcctctgcccctatcacctccaaaccagattctgcatactccaaggccccttacgtgcccttttctctgaagaccccctcattcctccaactgtaagtgatatttcccttatcagaacctggacacttcatctgttttcttcctcatgggccaacatgctctatcttgtattattattatttgaaatcagggcataaccccattattagatgtttagctctttgcgggaaggaaccttgtcctaaataatttcatgcctcccatatccacccacataacccagaacagtgtgttacacatgctaagtattcaataacattctctaaaaagacaaatgcataacttgaagctaattttaatttcctactggctgcaaccacttctgggccacttcttgccatcatcaatttctattttctaaaaatgtaaatgattttcattttagcttggatgaaatttattggaaagataaatctactgtaatcaaagtcagatatacaaatatttaaattatctctgccacccaaggtaagttatataatatcatggggtatttttttatcagtaaagtagaataataatactatctattgtatgaggttgtttccatcattaaatgaaataatgtatatacagtgcttagcacaagacctgggatatagtaaatgcttaaaaacaatagacattaataataatagttatttgccagttagataatttctaagacctattccaattatgtttgtaattctctctccattagtgcagacaattaagaatagattttaaacataaaatatgcacatatttaataatacaccatagtcatgatggtatggttaatcctacatttaatgtttgtgttttgtttgtttgtttgtttgttttgagatagggttttgctctgtcacccagaggtggagtgcagtggcacaatcacagctccctgcagcctcaaactcccgggctcaagcaattctcccacctcagcctcttgggtagctgggaccacacacacattccaccatacccagctaatttttgcattttttgtagagatgggttttctccatgttgcccaggctggtctctaactcctgggctcaagtaatcctcccaccttggcccccaaagtgttgggatgacaggcaggagccactgcgcctggtccctacatttaaaatttaaagtaggggaaagaaaaaccaactcagaacttgaagcaaactgagaacatagcacttccatgttcttctctgtaaaccttcctgtgtgatcagtggctatgacagctcattcatttgttcattccacaaatatgttttgagtacttatgacatgcaagtttctctggaagaagccacaggggaaaacaaggatgaacacaacccaggctttgctctgaagcattctgaggtgggaggaagataaataagcacacacaaagcccagtattttgcgatatgacaagatactgaagaagacaaactgcaggaaggaaagtcatcagaaagaaggggaggggaccacaacataaccttgcaccaggcacattgatttagaagcaaaagccttaagatcttgcctttcagaagaagcatgctctttgtatgagcctccttctctctttttttaaatttatttattatactttaagttctagggtacatgggcacaacgtgcaggtttgttacgtatatatacatgtgccatatttgtgtgctgcatccattaactcgtcatttacattaggtatatctcctaatgctgtcccaccccactcccccaaccccacaacaggccccggtgtgtgatattccccttcctgtgtccaagtgttctcattgttcaattcctacccatgagtgagaacatgcagtgttcggtttttgtccttgtgatagtttgctgagaataatggtttccagtttcatccatgtccctacaaaagacatgaactcatccttttttatggctgcatagtattccatggtgtatatgtgccacattttcttaatccagtctatcattgatggacatttgggttggttccaaatctttgctattgtgaatagtgctgcaataaacatacgtgtgcatgtgtctttacagcagcattatttataatcctttgggtatacacccagtaatgggatggctgggtcaaatggtatttctagttctagatccctgaggaatcgccacactgtcttccacaatgcttgaactagtttgcagtcccaccaacagtgtagaagtgttcccatttctccacatcctctccagcacctgttgtttcctgactttttaatgatcaccattctaactggtgtgagatggtatctcattgtggttttgatttgcatttctctgatggccagtgatgatgagcattttttcatgtgtctgttggctgcataaatgtcttcttttgagaagtgtctattcatatcctttgcccaatttttgatggggttgtttttttcttgtaaatgtgtttgagttctttgtagattctggaattagccctttgtcagatgagtagattgcaaaaattttctcccattctgtaggttgcctgttcactctgatcatagtttcttttgctgtgcaaaagctctttagtttaattagatcccatttgtcaattttggcttctgttgccattgattttggtgtttcagacatgaagtccttgcccatgcctatgtcctgaatggtattgcctaggttttcttctagggtttttatggttttagctctaacatgtaagtctttaatccatcttgaattaatttttgtataaggtgttaaggaagggatccagtttcagctttgtacatatggctagccagttttcccagcaccatttattaaatagggaatcatttccccatttcttgtttttgtcaggtttgtcaaagatcaggtagttgtagatgtgtggtattatttctgagggctctgttctgttccattggtctatatctctgttttggtaccagtaccatgctgttttggttactgtagccttgtagtatagtatgaagtcaggtagcgtgatgcctccaactttgttcttttggcttaggattgacttggcgatgcgggctcttttttggttccatatgagctttaaagtagttttttccaattctgtgaagaaagtcattggtagcttgatggggatggcattgaatctataaattaccttgggcagtatggccattttcacaatactgattcttgctatccatgagcatggaatgttcttccatttgtttgtgtcctcttttatttcgttgagcagtggtttgtatttccccttaagaggtccttcacatcccttgtaagttgtattcctaggtcttttattctctttgaagcaattgtgaatgggagttcactcatgatttggctctctgtttgtctgttattggtgtataagaatgcttgtgatttttgcaccttgattttgtatcctgagactttgctgaatttgtttatcatcttaaggagattttgggtggagatgatggggttttctagatatacaatcatgtcatctgcaaacagggacaatttggcttcctcttttcccaattgaataccctttatttccttctcctgcctcattgccctggccagaacttccaacactatgttgaacaggagtggtgagagagggcatccctgtcttgtgccagttttcaaagggaatgcttccagtttttgcccattcagtagctggttttttgaaaagatcaacaaaattgatagatcgctagcaggactaataaagaagaaaagagagaagaatcaaatagatgcaataaaaaatgataaaggggggggggagagatagcattgggagatatacctaatgctagatgacgagttagtgggtgcagcacaccagcatggcacatgtatacatatgtaactaacctgcacattgtgcacatgtaccctaaaacttaaagtataataataaaaaaaaatgataaaggggatatcaccaccgatcccacagaaatacaaactaccatcagagaatactataaacacctctatgcaaataaactagaaaatctagaagaaatggataaattcctggacacatacaccctcccaagactaaaccaggaagaagttgaatctctgaatagaccaataacaggctctgaaattgaggcaataattaatagcttaccaaccaaaagagtccaggaccagacggattcacagccgaattctaccagaggtacaaggaggagctgttaccattccttctgaaattattccaatcaatagaaaaacaaggaatcctccctaactcattttatgaggccagcatcatcctgataccaaaggctggcagagatacaacaaaaaaagagaattttagaccaatatccctgatgaacatcaatgcaaaaatcctcagtaaaagactggcaaactgaatccagcagcacatcaaaaagcttatccaccatgatcaagtgggcttcatccctgggatgcaaggctggttcaacatacacaaatcaataaacgtaatccagcatataaacagaaccaaagacaaaaaccacatgattatctcaaagatgcagaaaaggcctttgacaaaattcaacaacccttcatgctaaaaactctcaataaattaggtattgatgggacatatctcaaaataataagagctgtttatgacaaacccacaacctccttctctccttagctcaaattcttcacaaaggtgaggaaagaggccgacttgtcagcattaagtacccagtggggcatcagtagactagttccacagggacttctattattaagccagctggattatcctgctctcaggggcaaagcaatttctataggaagggttggtggtgaatctttttttctccttttaggaccccagaagagctaagagaagcaaaatcctccgtctgaaagagaggtagtttttggcagcctatggaagcctgagtcttccttctattcaggtgtctggctggctccccatcatcaggaaagaagcctcatgcttcaaagaaaataaatcctcagaaaactgagcatctttttaaaaatagaatttccagaccatttgcaatttgtaatatagacttgggctcttttggagaggggaaagtgaacaaattgttgggactctaattgatacatggatcggcagacatcctggaggaacttcagcctgttggtttatcaggtggcttgtcccttctgcctgtgatgggtttctgggaggtaagcaggtggtggtagtgactgcgaggccacttgtggagactgttggccagttatttacagatcatatgcaggagtatttcaggaataacctgaagattatgcctttgaaaatgttagcacaagaggtgtgtcccacacttaaaaaaatgttctttgctttaaaatctctctaaacttgctagatactgataacaatttgaattgtttatgtcaatatcaatttttggtggccttaatggaaacttcagggcataatgaagactatttgcagatacattgggttttttaattaatataaaattaattaaaggaacacattttaattctaaaacctagttttcttaaaccttgaagttcaacatagaaaccttattactccatttataaattgagtagagtttaaccatcagtttcaaggaaattaaagctctgtcaactaaagctgcaggaactaactttcccaaacactttcatttacatattgagttaattaaatcctgttaaaaatttcaaactgcatttacatacttaatatacagaccttttttagcacttcaaatgcttctatcaaacaaaatgttctcaaatatatgactctagcaaaatgtaactatagtaatggtttagagccttagtaaaaaggtttttaaaggcctccttatgcctttcaattaaaaattacaaattagactctttaaattgggataattccctaaaaggtgaaaacctcccttactaatatttgaaataccaaacaaatacatattatcctcaaaatcataaaaatctcttcctgactttacacaaaaatgctaaccctatagatttgatttacttctctaccgctctactttaaaccttaacaaaattaaaagacagattaagaaaatagctacaccaccccaaacaaaaggaagtcactactttagtggaacaagcattcatattggccagaggtttttagctgaggcataagatttgattctctccatggtaatgacctgcaacacagtgaactctttttatagttgccatagcaaaagtgactccaagtccatgccctttagacatcactggttttacctggtttcaagatacaaccttaccagtctatcggcaacccagaccctgcaccagtttgcttaccactttattcgctaggataaagaatatttatgcttgattccatcctgaatgtttttcttattcttgcattctgactcacaaatatctaaatgataccctataaaattctgcatatctctcatcattgctgtaactgatggcctcaaaccaagctggtccccttcacatgacccagccagtctcacaacatgagagacggttgacacatgttctcttccttttcccattaggtccatctcacacgtaagtctctttgattgttcccaaagggattgacccaagttcagacacaatagatcaagtgaggtgtggaaaggggctctcctttaaagactgcctctcaaactgtaatgtacatatgtaccactgagatttcattcaagtgcagaatctgatgcagtaggtctgacctggggcccaagactcttccttatgaacaatcctgtggcaaccctgatctgttggtcctcagaccacacattgaatagcaagactgcatagttgatggtacgtgaactgtagggtcaacttggcacctcgattctatgaattatgcaagcaaacatcttgtttcccttcactaaagtccttctgtctcttttgtcaatcattggtcctcagcttatatttttaatttaaaaaaattattggtgtaaaattcacataacatgaaattaaccgttttatttatttattttgtaatttcaccttttagatacagggggtgtaagtgcagtttattaaatgggtacattgcatgatgttgtggtttgcggtacagatcccatcacccaggtactaagtgtagtacccaataggtagttttcaaacacacactcccctccctcccttccctccagtagtccacagtgcctattgttcccatctttatgtccatgagtacccagtatttagctcccagttataagtgagaacaggaggtatttggttttctgttcctgaattaatttacttgagattatggcctccagctgcatccatgttccttcagaggacattatttttccttcttaaaggctgcatagtattccccggtgtatatgtaccacattttctttatctagtccacttctgatgggcacctaggttgattccatgtctttactgttgtgaatagagctgtaataacatacaagtgcatgtgtctttttggtagaatgatttgttttctttggggtatattcccagtaatgggattgctgggttgaattgtagctctgtttcaagttctttgtgaaatcttcaaacttctttccacagtggttgaattaatttacattcccactaacaacgtataagtgttcccttttcttcacagccttaccagcatctgttattatctgactttttaataatagctattctctgcagtgagcccagattgcgccactgcactccagcctgtgtgagagagtaagaccctgactcagaaaaataataataaaaatagtaatagccattctgatgctgtgagatggtatcttattgtggttttgatttctcagctcattttttcacaagtattctctctctctctgagacacacacacacacacacacacacacaccaggtccttttcctaatccttttcaaacctgccagtgagaatctaatgctttagtcacttgaaaagtactctgtatgcagatttgaaaagaaggctatatagagagaacactgggatagtgctacagtttggctgtgtccccattcaaacctcatcttaaattgtggttcccataatccccatgtgttgtgggagggaccagtgtgaggtaattgaatcatgggggcagttatctccatgcagttctcgtgatagcgagtgagttctcatgagatctgatgtttttataaggggcttttccccaccctcactcggcacttctcctgctgccatcatgtgaagaaggttatgtttgtttccccttccgccatgattgtaagcttcttgaggcctccccagccctggggaactgtgagtcaattaaatttattttctttataaattgccagtctcagacacatttttactagcagcatgagaacagactaatacatatagtaaacacaaacttcagctatgtgttaataataatgaccatttattatgtgctgattacatgtttgtcactagaagtatttatctcatataatcctacgaaaaaggtatcattgtcacatgttaaaggaagagaaaactgaggttcagaaaggttaagtaacttgtttcaggtcaaagcattagtacatgacagagtggcagatgtccacacttctttgaagctcatcccaccaggctggccttgtgagtagctttaactgatagaatgtagcagaaaagacttccaaactttgacctcaagaaggctggtagcttctgctcttgccttttgaacactgctatctcatgaacaaaattaggctcacctccttgaggaagagagactttacagagatagaggcccagttatcccactgtggcagccaaaccagacatatgaggcaagtgaagctatgtgggaccaaccatccttcagcctatttgcaagctaactgtggacatatgagtgagcccaggtgagccatcctaggctgagccctgcctaaattgcctacacattatggaaaataaagagttattgttttgacccagtaagttacaggatggtttattatggaacaatatacaactgagctaagatttgaattataaggaagtctagctctaaaactcttctgagcccaaagccatgatccatcatacactaactcgtggtccataactgattttggtcctgcttgttcctttcagagttctagctctagacctggtataatccatatgtcacttctgatttttctgtgcctccaacaccttcaccacccttgggctgactatcttacctttcttatctttgggctccagtcctccttcaagattgccctaggtgtccttttttgagctgtctgcctggtaatctgtatgtgggggttcatgttctgatcctgcttggggtctctaggagactgtttcttaaattgtactgtgcttacacatctaacgattttgttaaaatgcacattctgctttaggtggtctggggtaggacctgagatgcttcatttcaaataggctcccaaggtgatactgacgctacttgccaaaggatcacactttgagtagcaaggctgtaggctactctgcaaagaaactatttcactgcttcctcattcacataaataatagtcatagctgatggggatcatggctggattcttcagccaaagagggagtctcagctgtgcatttatcagtgacctgcatacttgccagtttaacccagggaacaatgttaaatggaggaaaagataaaagataaagattcaattttcaaagtattcattcaataatacaacaaatatttaccaagcatcaatgccaaaccactatgtggtagcatctaggtaggaaacctcaggacatcctcttctgagggcttggatcacgtaagaaaataccattttataatgggatgtcctttctctagtcacctcacagccccctgaactaattagctgaactctttgagcttcatatataacgctgactgaaacaatttgtttgtaatgcagcagtttgagtttgggaaccagtgttacgtttgcaatgtaacagtatggttagtgtttagttatctgtacataggtgaatgatcaatcttgaaaagtatatgccttggcagcccaacccctttcctaagaatcagagatacattggtggggcgcagtggctcatgcctgtaatcccagcattttgggaggccaaggcgggcagattgcctgaggtcaggagttcaagaccagcctggctaacatggtgaaaccccgtctctactaaaaatacaaaaattaaccaggtgtggtggaacacacctgtagtcccagctacttgggaggctgaggcaagagaattgcttgaagctgggaggcggagattgcagtgagctgagatcgtgccactgcattccagcctgggtgacagagcaagattctgtctcaaaaaaaaaaggatcagggatacacatgatacttgtaggtaactctgtaaatagggctagataggtgacttatttgatctgaatccctacattctttgcttcaggagtcccccctcgaaagagaatgtcctggagctctccagatagataccaccacatactgtttggcataggtgtcttgtgaatatttattgtattatcgaatgaatgccttgaaaacagaatctttatcttttatcccttttctccttttacctggtaagtccttctaagacaagtgctgtctcagccctgactagatgaaggactcagtttccctagggaccaatcagctacaagaaccactccaccttcctctacatcaacacacgtgcctgtacctggaatggtgagaaactgtcattcttttttttttttttttttgagacagagttttgctcttgttgcccaggctggagtgcaatggcgcgatctcagctcaaaacctccaccacaagggttcaagtgattctcctgcttcagtctcctgagtagctggaattacaggtgccaaccatcacacctggctaatttttgtattttcagtagagacgaggtttcaccatgttgcccaggctggtctcaaactcctgactgaccttaggtgatctgcctgcctcggcctcccaaagtgctgggattacaggtgtgagccaccacacccggtccgagaaactatcattcttaacttctctctcctgccaagaatctacctttttccttttcttctagacctcacaaggagagggatgagagcttgctttgttttacccagtcctgggtttgcagtgcaaaggcctacttctggaatgataaacttcatctttaattagtctaacacagataggatccagagaagcaatgtggtgtgagacagacagggtccctcccctcgagatggcccagtgagagatggagacaagctgttgggcactacaggtatggctactacaatgggggaacacagtattcctctgagcatttaggaaggcacccactcttgttttgggaatgggattggggtgggaacaggaaaggcttccctaagaagttatcacctaaggtggatattaaagaataaataacagttagccaggcaaaaaggaaggaaagggtggtaagagaacatcctgaaagagaaaagccattgtgtaaaataatttgaagaacaagtcattaattcaagtggcaatggtaatttgagatatgcaaaacatcctatttcttagtatttgagattttgctccatcttttacaattgtgcttacttttagaaagtgaattccatagtggaaagcttccctgaggaatatgtgataattggacaaagctttgctgacatttacctttgctgcatctacaaagaaataatttgctgagataactaatagagcaaccaaaagcagatgtacctaatctacttcaaggacacttttttttcagcattttgtaagcacactaaatgcaaattatattatgcataaaattaaaaatcaacctcatctagtcatcaaaacaagttgtggcttaacatctaccaggaaacagccactataaaaataaatttgaatttaattacacaatgcagctttttaaaagccctttccttttaactttgtattaagttgtattaagttagcctgaccttcttgtaatttatctcacctccaaggtttcaccaaatttgatagatgctgaattacctgtgactgacttatgttttttgttagctttgaatatgaaaaaggaagtttccaaattcttttgttagtatcggtttaaacaggactataataatcaatcaaaataagctcatttattaacacaatttgagtatcccttttcctaaatacataggatcagaagagttttggatttgggattttgggggattttgaaacatttgcatatacataatgagatatgagacccaagactaaacacaaagtgcacttatgttttgtatataccttattcacacagcctgaagctcatttaatacactattttaataatgcgcatgaaacaaagttgtgtacactgaatcgtcagatggcaaaggtgtcattatctcagccactcatgtggacaatctgtggttgtttgacatcatcctcattcctgactttgaatttatatgctacaaattaacaatcattttcacttattcacacataagtacttaacagtaaaaaaacaacatcccattaatacagttaaaaaatagtatgttcaggataactcagcagcacagtagcttcactagaacacctgcatcagctgctaaacaacggtagcaacgaataacagcaggctttcagcctccacctatgatgctgtgttgtgattaaaaggttactgtccactgtgttttatatttttaggtgagaagaaacatcagaagaagtcgaaggaccaggaagtgggtcttctagggactaggaggcattctgctgaatggcttttaaaaatgtttcctctagactcttctgcctcattaacaacggttgctgtctcagaagtctctttgattttgtaaactgtcatgatttctcgttcttgaatgaatgcacactgctctagtccttcaataagcccatcacacattttcaccatgttgtctataggcactttttctgtagtgttaacaaaatcaaatttatgactattatgacaattaccttgattcagaaccattttggttattctaccatcaggtggtgaatgaacaactggagcctcattatcgatgtcaaaaatttcttcaggctgggcatggtggttcacgcctgtcttctcagcacttcgggaggctgaggcaggcggattgcttgagcctaggacttcgagaccagcctgggcaatatggagaaaccccatctttgccaaaaatacaaaaattacctaggtgtagtggcgcgcacctgtagtcccagatacttgggaggctcaggtgggagaatcccttgagcccaggaggttgctgctgttgtgagccatgatcacaccactgcactgcagcctgggcaacagagtgtgaccctgtgtcaaaaacaaaacaaaacttcttcaataggccgggcatggtggctcacacctgtaatcccagcactttgggaagccgaggtgggaggatcacttgaggtcaggagtttgagaccagcctggccaacatggtgaaaccccatatctattaaaaacacacacaaaaaaattaaccgggcatggtggcatgcacctgtagtcccagctacttgggaggctgagccacgagaatggcttgagccagagaggcagaggttgcagtgagccaagatcagcctgggcaactgagcaagactccatctcaaaaaccccaaaaatggcagggcgtggtggctcatgcctgtaatcccagcactttgagatgctgaggcgggcagatcacaaggtcaggagtttgagaccagcctggccaatactgtgaaaccccatctctactaaaaacacaaaaaatagccaggcatggtggcgggtgcctgcagtcccagctacttgggaggctgaggcagggggagtcccttgaacctgggaggtggagtttgcaatgagctgagatcgagccactgcactccagcctgggagacagagcaagactctgtctcaaaataaataaataaataaataaataaacccccaaaacgaaaaaacttctttaatataagaagaaagtaaaaaaacttcttccagcttcactaatggactccaaaggtatattttttgcatatgtaagaaggccagacatcattttttttctcacttgacatacagaatcattcaaacttgtcaccttgctcgtcatcatcactgaacacagttgcaggccagaagttgtgccagacatgcccaaccatgtgtttagtcattgtgttccaagcactggcaatagcatatatagtatccttcaggctaaactccttttgaaaactttccacagccacgcctctgttcactattgctagcatgctgttcaaaaagtttattgatctaaggatagcatggtcatatggctaaattaataaagttatctttgtgagaaagtatatgacataaacatttctgctgaggatctcaggtgaaggatgagcagaacagttgtcaaggaataacaagatcttggagtggacatccggttcagcttttctgcagtgtgcatgaaccactggtacaaaatatttgagaaactgccagaaaaaaatgtccttggtgatccatgcctttttgttggcataataatggactagttaagaaattcactccttgtaaacatcaagtatgcatgcttttgcctatcacagcaagtttacactctgtgtggctgttgcattagcacatcccagcacagttattctatccttagtatcctgaattcctacaggagctgcctcatcagctgtagtcagagtctttctggggtaataatgccaaaacagagatgtttcatcagcattatagactttttctgggataagactcatcagcaatgaccttgtcaaactgatacacttttatgtgttttattttattttgttttttattttttaagagacagggtctcactctgtcatccaggtaggagtgcagtgcagtggcatgatcagagcccaccgtagcctcaaattcctgggctcaagtggtccttcagcctcagcttctggagtatctaggactacaggcatgaaccaccacccagctaattttttttaaaaagatttgtagcaattgggtcaccctattttgcccaggctggtctcaaactcctgggctcaagcaatcctcctgcctcaccctcccaaagaggtgggattacaggcatgcgccactgcatccagctgatgctggcaaactcatcaatgaattgctccgctgcttcacgatcagcagaagttttatcaccacaaatctttaaaaatttaatgccatatctattcctaaatttctgcaaccagcctattgactaatcatagttctcttcacttttcaattcatcgtgacagatctttgcttgtttcatgatctacatactatgaagtggcatgtgtttgttcactgcaacactgacaacccactctttcaatacatgattgaggtctttatttttagctttatgcagtgtttttctatttttaattaacttctattcatcactttcagcatagaacttcaacagtcctgtttcttcatgtcatacagggtggtcattctaacaccacactgctgtaagatgattcacacttataccactgtccagtttgtccaatagcttgactctctgtgctatagataaatattcttcctctttctcttaccactgttacccataggggtatctgtagggctttttggtattttcaacaatatctttacagagagtaagcaaaaataaagtaagtaatgcacgtgggtcttggtcccatgtagggcatcatggggaacctgctgtttgcatatctggcctgcacacatgccatgttattaccttttgtgggtgtgcttgcatgaaggaatctgggcatgcctagaaaatatacatcacaattaaagggcctgggagggtgtttctttgctcggggacactgaaggaattgtgtgttgtgcatctgtgttttgacttcgactcatcacgtgaggtcagctgtgaagttttccacttgtggtgtcatgtcagcactcaaaaagtttcagattttcaagcattttggatttggggttttcatattaaggatgcccaacctctttattcagttgtcttatggggaattgagtccagtgaagggtatcaaggaatcataaaatgttgagcagggaagtagttcagaaatttccaaactcaaagtcctctagagagatgaagtatttcccctaagttcacgatgcttagtgaaaatgtcagtacaggttcatctttttttgttgcaattctgaaatctcaaagtcgaaatcttaaaatccaaagttttgttttttaaaaatttagtgcctaacttatacagcaaaacgtgccctacaccaacatgaggctatccatcctacttaatatgaatattcatacattttcctgaagacacgctgatgtgctggattacagaaaactttccaggacctccatggaggtgtatatacaccatgaagcttttctacagtctgaagaattctaagttacaaaacaaatctggtctcaagggttctggataacaagttttatgaatccctaataatagtcattaattactgggcatttgctttgcaccacatattgtcctacaattttagatgcattttcataactttgatttgacacattccactctgacctcacctgctatctttccagctcactaattctattaccccaattccaaaccttttaaaccaagggtctctccaccattggtccttctcccacttcacacttgaggtcctatcttctctttataattacctgacttaaatgctttggtcaattattatgctgtaaatactcacttcagaatccctcaaatcccttgcccttctctggctttgacttatttgtttagcaaaacacaaccctagtgaaacccacctctttccctgcactggaatggttgaatatgtctggtgaaaaccatgctgactgatctcgttttgagttcatagtcattaacccttaactgggcccttaatgctgcctggcattcatagccaggcatgaggttcacagcaggatgaggttcccctcatccattcactctcctgttctcctagagaacaagctcatacttccttcttcccctcaagaatactcctttccccacttactcttaggtgattactatgctacctatttctctaagaaaagtgagagaagcagaagaaaacctccacagactcccacaaccacatactctcctaccagtcactgtacccacactctcagccttcctgcctagtccctatgaaaactccccatgagtccctggcaccaacccctctcatactcaagcacattctcctctttcctgcatcgtcaattttcacccaatcattcacagagttagatcaacaacacaaacctcccatagccacccacccacatcagcaatctgttaaatgattagttagacgggctcccccatttcacaccaagctctgacaatagcctcaaggtcctatacaacctgatctgcagttacttcacttctgcctctccaaccactctgtcttctttgatctttgctgtcaaacatgcctgacatactcctgtcctctggcctttgtaatggctcttccctttgccttgaatctgctgcctctagatatccacatggcttactccctcaccagcttcacatctttgctcatgttatcttctcaatggaggctaccctgtctcccctatacaaaattgtaacccactaccagcctcccatatcccccaaccctgtctttggaacccttaccctgcactgctattttcttagcacacagaacttctaacatattaatatattttcttatggttatggtgttttatttgcttcccatccccctcccctcactagactgtacatgccacaaaggatctgtattctgttcactgacatatcccaaacacctggaacaatgcctgacacatagtaggcattcagtccatgcagaatgaatgtcatagtttaaatttcacaaaaatctaatgtgttaggttttatattatctttattttatatatgaagaaacagactaagttttaaaaataggcccatggtcaagttacaagaaagggagacagccaggagcccagtcttcctgattccacagtctacttgctaaatggccaggccatgtggcctccctacagtgcgcttgcctcaaggtttggaataaacatgttgaactgcatctaccgtcaataaaccatcatcaaatgccacagaagtttattgtgtcctcttggggtacatgacagcttggtagttttgatctaacatcaaattctactcaatttacttcctgactccagaagataacaggtccaaaagctcatctattctaggccaaagaggttggtttcattcatgtatcttttttttttttttttttttgagacagagtctcactctgttgcccaggctgtgtgcagtggcacgacctcagctcactgcaacctctgcctcagtctcctgagtagctgggattacagcagtgcaccatcatgcctggctaatttttgtatttttagtagagacggattttcactatgttggccaggcttgtctcaaactcttgacctcaagtgatccacccctgcctcagcctcctaaagtgctggccaggctggtctagaactcctgacctcaagtgatccgccttgaggtcacttggcctcccaaagtgctgggattacaggggtgagccactgcgcctggccatttatccactgattcattcatttattgagcaccgacatgctgagggtatcctgtagatggttgatttggatgcagtcagtaaaccaaatttctcttcttgaaactaccatgaaggaaaaaatgcccacatcatttttggaactaaatccacagatgaaaaatcatcttttctctaactgcatcagaactaatgctactccctccagctcaggaagagcctcctatcccagcccctgtgctagggcctccattccagtggaagtaaatgtgagctacatgactgatagtttactacttctgaatagctttgtactggaatttggaaggaatgtgtatagtgctcaatatgaagctcagtttggcttcagggaccattttaattaaattaattatctctaaaagaaacacttagagttgtttaagcctaaacaataggtacttgttctcatttctaataggagtcacattgttcagagagttctcttggtgagctgaggacaatgttaccaccagctatttaaggaagaccttccccttcttgccccatgccttccctctcacacacaggagagaggctttcagagaagtgggatggagggcctggcacattaatgtaccaaatctacaaatgcactccactgctttcttttttgttgttttttgatttttttgttttgttttgttttacagccagaggtcttttattttattttattttattttattttattttattttattttattttattaacacctatgatgccatgaattcacagggaataggttccagcagctcaggctccttcccacaagctttcacaaagtgcgcttctctgggtggagcaggctggtgcttcacttgaacccaggtaccttcctctttggcttctttctttttctgatcattttccttcacacatttcaggaagctatctcggctcttacagtgcttaatgtgctcaatatgcacattaattctcttggcaagaatcttacccttgtttacaacaatgccaacagcatgctggggaacactgtagactttcagttttgccatggtaacacttgtggggcattcctttttgaacagtatccattccgttgatgtgtaccatatcacctttcttatagattcgcatatttgtaaccaaaggaacaagtccatgttttctaaaaggcctagagaatgtataccggtgcctctcctcttccccctttgtgttcatcattgtggcaaattactggaaggtggcagttttggccgaaaggaaggactgcttccttaactttcctaactcatatgtgtcttgtgtttgtttctgttgtggattcttagtcacatggccttgttctgtatggtctgcattttcaggaaaagcatcccagcctaagtggcccttgtacccgtgaagaaataggcagtgtcacttttactttgtgttctcctttcctccaccatttcctcctagtgtgtccttgttttcagaaacactagactgatttttaaaaataatattgtatactccgcctcattgcaagaagactcaatctggcttcttcgctccattctttttttttttttttttttttgagacagagttcactttctcgcccaggctggagtgaagtggcgcaatcttggctcactgcgacctccgccccacaagttcaagtgattctcctgcctcaacctcccgggtagctgtgattataggtgcccaccaccacgcctggctaatttttgtattcttaatagagacggagtttctccatgttggccaggctggtctcgaactcctgacctcaggtgatccacctgcctcagcctcccaaagtgctgggattacaggtatgagccactgcccctggcctcttccttccattctatctgttctttttattattgcagtacaaagaagtaaaatgatatctccctctcatcttctgctcctcacagtcagccatgcccccacaaccttgtcatcactaggaaaaggagtgtaggagggctctcttcacccccgacattcacttttcagagctgtgtgttatttttaaggatgcatcatggctttgtgggaaagccttagtgtgtgtgtgtgtatgtgtgtgtgtgtatgtatgtgtgtgtgtgtgtgtgtgtgtgtaattccagtcaaaggtaagagtgtttaaagcttttctgtgttgtgctaagcccttctccctgagtcttctctcttagatacagtgtgattcatctaactccagtgactaatggccatgccaagtacagggtgttggtctctgttctttggtctctctctcagtgactgaagagtggacaaggcacacaaaagagagctctaaaggcagtcaatcaatactgcagactgactgacaatggcagtattaagtgccatagtggttgggtttactggaatgagtgcaaaataaggaccagagctggccaaattagctttacataataacactaggcaattggtattggaagagatggctaaagcccaggccacaggataagcaggtcccttccagctttgactatagttttggtgtttgtttttttgttttgttttgtttttgtttttttgtgagacagggtctctatctcccaggctggagtgcagtggtatgatcctggctcactgcagccttgacttcctgggctcaagcaatcctcccactcagcatcccaaatagctgggactacaagcaggccaccacggctggctaatttttgtattttctgtagagacagggttttgtcatgttttccaggctggtctcgaactcctgagctcaagtgatttgcctgcctcagcctcccaaagtgctgagattacaggtgtgagccaccgtgctcagccttcacctttaactatctgtagttatttagcaagtaggacttggtctgcagcacagcggtaattccactactctttaactaaagtaagaagtaacaatgacactcagaattatttttaatttacttttggtatattctaattcattaatgagcaaacaactgaaaaaagaagaaaaacatgttaatcttccatcgttattggaaaaaaacagctttgttgtaactaaaatttcatgtattattaatttgagacaaggtctcactttgtcactgaggctggagtgcatggagtgcagtggtgtgatcatggctcactgcagcctcaaactcttgggttcaagcaatcctcccgcttcagcctctaaaataactagaactacaggtatgcaccgccatgccaggctaattttttaaattattttttgtagagacagggtcttcctatgttgcccaggctggtctcaaactcctggcctcaaatgatcctcccacgtcagccttccaacatgctggaattatactcagcctcatgactaattgttaatgtctgttttttttctttctttctctagaatgacccaacccatttgacaaaaacattgttttgaatgcatagtcaaattccaaatcatatcaacatcgtttacagataacaatcaagtgggtaggccaaatccaaataaccaatttttaaagtttttctagtatgccttggtaccatgtattttgtatcttaacaatattgacctctacaggtacggaagcagagacctagtaaaaattaatggcaaaagtcagtgtgttaacagattagattgcggcaacccttaatcatgaactgctaaactttagaccatgagctacctgtttcctaagatcattttagtgtacagaagaatttccatatttgaaaacaaattttgaaaatgggggaaaaagtgaggtaaacgagggtattaatcatactctgctttccatgttctaatgcttagtaaatttacttggcacacacacattcttacattaggaaatacatttaagtgagtctaagtttcatcgtttcactcactgaaaaaaaaaaatctactttatacaatttggagaaaggaaaagattattctgtagttggaaaggcaagtattatactcttaggctaccctcttaactctgctttggacaaacacaataaaggataaaaatgtttatgctgcttttcttccctgtgttttccccataggacagtctgtatgtggtctaaaatcatgacctatcagagacttacatatttttaaagtagactggagcctcagtgtcatctctcttcatcatgatactgtattattaccttttatcagccacatcagggaagtatacttgttcatttaaatcaagggtcaaaccaaatactcacatgtgtgggaggagttcttttcataacatgacaatgtctctatcttttgttttggcctgtattgatgatttaatgatgaacttcctccctgatgtttattcaaagacattgttatccttcttttcattctaagggatttgggggctattattttttagcagtggctggtataggtgaaagcagtgacaaagcttctcaaagcaaggaataaggcagtgaagccacggacacatagagccatgggagaaacaaggccatgggagaaacatgactttcctcaggttaaagtcgtggggttaaaacccttttatattaaaacaagtatgattataaaatgtacttattgaacaaacatttatggtgcatttatcatgtgtcaggcaatattcttgattctggaaatatactggtgaaagttaaggtggccagacacggcacccaatttcatggagctggtattctaacagagaatgacaaaaatatgaataagaaattcagatagtgaaaagtgtaatgaagaaaatatacaatgtcacagtgacagcgcagaagagctcattcagactggcaggttgggaaaagtttcactgaagaagggacatttgagctgagacctgaaatcctaagaggagggggtcattctaggcagagacaacaatgaataaacaaccccacgggaaaactaactttgcctttctgagtaaccgaaaaagacaatgcagtcagactggagtgggtggaacactgatgataagaaatgatgtcaaaaggcaggcaatggccagactgtgtagaacactggaagaacagctaaagaggcaattgcaattcaggtaagaactgatagaagataatggaaacttagaaaaaaggaaaagcgatggatatgaaggaaaaattaatgtactgcaggtgtatttttgaagtagattatgagattatgggaaatggaggagaaatgacagctcctgggtttttgtctgagtgaaatatatgagtgagaggagaaggaccatatagtgagatgaggaagaatgaaaaaaagaaccaatttcacagggagaaagtcaagagtactgttttagccattttaagtatgaaacacctttttattattcaagtagcgaatggtcaagtgggcgtttaggtatctaaagttatagctcagtggaaaggtcagaactggcaatataaatctgtacataagatggtatctaaaccatgcaattagatgagatcagtagaaaaacagaaaagtcttgggcctgagcctggagcacaccaacacttaaggcttaagaggaagacctacagccaatggatagagcaagaagcaagaaactgggagagcatgctgttaaagaagccaagaaaagacagatagtgcatgaagaggacttaataaatgcggcaggagttaagagagagatgactgatttggcaaagtggaggtgtttgtaatcttgacaagagcagtttcagggaatggtgggatccaaaacctagttttagggtccatagaggtaagctggaaatgtgaggaaatttttgagcaggtttctgtgaaggtgtgagagaagtggcaaaagaagatgtgaggtcaagggaaggtgtcgttttgtttacaaatgggaggcagaagaaaatgtttgtatgctgatggaatggtccagtagtcagaggctggtgttggaaaaagttgaagagggaagttatgacacagtaattttggagagtaagagaacaaacatgtttgtgaagcacagtaagatctttgggtagtacctatttgaaatttgtggtaatggatttaaaatgaaattagtcagcattggcttcagatttttctccagccccattcagctgttaggtgtaagcgcagagtaaagagatggagcagtgcttaaaacaagttgggactcgcaggtaggagactatgacagagagtagacgaagttgatacgattacagaaaagcaattgctaatgataggctatgataaattcccaagatatgtgtttattaaatgtttgatgaatgacacagacctggaatcagactttacccattcctagaagggtaagtcgctgaacttaagtcaataattcctttacagaatttctgagaggacttaattataatttttgtatagtgcctaaaataggacctggcattgaacagtcactcaatacatgttagttttcaactccactttccaagtacaatttctcttcctcgttcagttactcaacaatcatttcttcaaaacagtctgtgccaggcacatactgggcgctaagatataatagcaaggctgataagaacctgctttcatggtatagcaggagaaacagatattttacaaataactaaacttaatatttatgttcagttgtgataaacactgtgaagactgacctagggagatgttgaaaacagatttttaaaacttttaaacttttgtaaaaatgttcaaagagaatctgttgttagaagtttaacattctgatttaactgttttgaatacgaaaaatacaaactcaaagtaaacatctaaaatataaggcaaatctatccatatagaaaaggaataagaaggtactgaccaatgaagttgaaacaacactgtcatattaatctcaaaaatggaccaaactggcctttattttagggtcagaatgcatgtgagagttgggctcaattcttttagaattgttccttaggatacttcttaagctttaactttatgccaggcattgtgctaagtgacagaaagagaaaagcagcccttggcatccaggacttggcttgttattaccagctaggccttggtgttctcctgttgaacataaacaatctcacagaagaccatcagtcaaggttactctgtgaccatgatgaaacagaaaagacctcttcacatcttgtgtaataagacaaaaacaaagtcgcagtgcaaagcacaaaatactaaatatgagtgactgctgcttctttacaaattacggctttcacttagcttcgtgtctcccacctcctaaatgagatctattcagaccaatcataaaattaccccacttccttacagaatcgaaatccagtgcaaactcttgcttgaatccttcccaaatcactcatcacaagcccaaatcctgaaagaaggcctttccagcactcaggaatccctacaatgtatctctagtttcaacaaacaaaaaaacccaactttgttcaactccttgtgtgttcctagtggtctcctgtgttgagtggcattaccagtggaatatatgcattatattgtgtaatcctcataagtacttcttgaaacaggtactattaacaaatccattttacaaatgaggaaatggaggcacagagctgttaagtaacatttccaaagccacacagctggagagtggcagaaccagaattagattccagtctgaccccagtgagattccctgataatgttccagataattatttagaattgttagtaggctagtctttcagtttaacaaagggcaaaacagtctttctatacctctattccttcgatcttacatactctttggtctcattgctaaacagtgaaacagttgagttctttatttaaggaatttttacttgctagctttacaggttaaaacaaattaacattggagcttgctaattttggcttatttcagggtcagaatgagcttcatcaatgacagatttgaccaggtccactcacattctcaaaatctttcaatagcttcaggctagagtcaaaaaaatttcagcatgatacacttgtcccttctccctttcctgaccttatctcttgatgcttctgcacaattcattaaacaggtattttgtaccagaccatctccccatattttccaatcatacagaaatcatcagtacttttttaacacagccttttcatgtgttaagcttcaacccatgcaacctatgacctttccaccccaaatatattgctcctttgaagatccaccctatcacttactttccttgattattagcacttttcataccatgttacatgcttattcctccagcctcaactctttagaaaccaaaaggcattattctctttgctatcctttatacttggcatgatgcccgaggttgggccaagcttagaccttagaccatttcttcaccaaattcaaatgtctcccatttctttagtaattggtatggtttgggtctgtgttcccccacaaatctcgtgttgaactgtaatccccaatgttagaagaggggctttgtgggaggtgactggatcatgggggcagatttttcccttgctattctggtaatagtgagttctcacaagatctggttgtttataaaaatgtgtagtacctcccccttcattctctcttcctcctgctctcgccatgtaggaagtgcctgcttcccctttgccttctgccataagtttcctgaggcctccccaaaagccaagcagaagccgtcatgcttcccgtacagcctgtggaactatgagtcaattaaacctcttttctttatgaattacccagtctcaggtacttctttatagcagtacaagaacagagtaacacagcaacacatttctagttctgttactgcactcaaaaaatctaagtttaataaattgtgcattagtcataatggaggacaattggttttcagattattttccaaaaatttattgtggatcagaagataactggattttttggatgtgtgcttctcaaccagcaatgtaagttcaataggtctttgggttacagcagtgtcaactcttaaagtaaactacgatttttttttttttttttttttttttgaggaagtcgtcttctgctttgccaggccactggttatacatgattaggggacacagtgtaataatgagtctccttgataactagtaataatgaatcctaataccaaaatgccaataccaaaaacaaaacacctcacagtagaatgattacttggggaagcagactgaagagcataggaactagttactactctcttttgtatattgaaacttgaaattgatgcaaaagcaataaaaatattctttaaagctaaaaatgtagttgctggggataacagaaataaagtcatacagctagtgtgaaataactgagacaatttatctatttaaatataatgggctgtcctatgaagaaaaacatatcaaaagagtggcttttaagcatagattaaaaaaattggtccagattcctttcagtttcaggaaaaaaggttaatcatgtattttaaaactgttaaaactagggacaaagaaaacacacttggcattaaaatgtcagtaagtttttgaaaaagattaccttggaaaagcaatttttgtgagtaaataaatttgctgtaatagtatgttctatcttcttcatattagcagtctcctatttctataggatttgtttaaaaaacttcaacaattatatcaaagtttcaaaaagttcaaagccttaaacctcttgttgaagaaagcaaaagaaccattttgtcaaaacaaacataaaaactcaaattctgaaatctaaatgttattccaagactatgattgacttcctctatctcgccaacacttttaactatttaaaaattgtctttttcgttgtattccgttttaagctgttatgattttatatatcaccccaaaatactctaaataatttttttttttttttggcagggggactgggtctcattgctgcccaggctggagaacagtggcgtgaccacggctcactgcagcctcaaccatcctggcagctgggaccacaggtatgcaccatcattcccagcttttttacatgttatttttatttgtagaaatgggttctccctatgttgcccaggctgctctcaaactcctgggctcaagggatcctcccaccttagcctcccaagtagctgggactacaggcgcataccaccatgcctggctaatttttaaaagtttttttagagatggggtctcactgtgttgcccaggctggtcttgtgggctcaagcgatccttctgtctcagcctctcaaagggcagggattacaggcgtgaatcactgcagccagctctttaaacaaattttaacatactattaaattatcagtaaataggttttaacaatgtcagctcctttacttcatctttctgttcaattaattaaaaccattctctaattgattttgaatgatttaatgtcatttgatcctgatacaaatttattccaaaaatgcaattttgatgagaacattagaattttaattaacatggacttactaaaaaaagtagttcaataggggaaacaaaggaaagaaccaaaacactgttcatgtctatccactcatgtgtgaaaatgtagcattcaaaaatgacagcacatttgaagcataattatagggacaccatagtggtggaagaagacagtgtaagaaagacaactgtcagagtgcggtactctggaacatcaaaaggctatattcgtcattgatggctgtttctttgagaactcccaaactatgtaagtttctgaaactgctccaggcattcaataaagcaaaaagtacacttataaaagtgtttaaaactttgtgatttttcaagtatattttatagttttatcaaaaatatatctaaagtttttttttaagtagctaaattttcaaactgcacaatgacaagctcttaaatgggggattctggtcaaaaggcatttggtcagcaaaaacaattttagatactgtagttttctgctactagttaacacacttgaaatttatatgatacacaattgtgctcacagaaaatatattcctcaatcatggtctaaagccagaaggttattagtactgatgccaacgaccaaaagtagggcctttcctgtcatttctcaggcacctgcttgtcatttaccctcaaatgacagcctgcggacagccaggtcccttgggcacagagttcttgattccaacgtttcaattcattacactagtcagccactatttcccgcaacacactttcaaactttttctaacttcacagaacttcccaaaatgtaacttctttcaaagaatggcaaactgaagttgaataattcagtcttaatttctagttaatattaatcataaaatattacatttttatattgctaattcattttcaagtagattaatttctacccatgtagctgcagaattagaaaggcaagtctctgtagagctggtttactaaacagctgaggaatgatgctcgaagtacccttcattatcccaaagcatttattacataagaaaacattatgtagactttatgtgcatattatctatagagaacgtaaagtaggttttactaaaattaatgtcactacacatcacagcttacgttttacaataaaaagagaaatcaaaaataaaaaaacaaaggatacagttagcacattattcacttgtttgcttggaaaatgcaatgagcacacacacacacacaaacacacaaatcggtatttgtagacctgcctttgtaatttaaaatgttaatgaaatgtaaattttttcagtacaaaattcatgactgttcatccctaggctgcattgtgtccaaccttgtaggagtccttttttaaattttattagtcccaaaagtccctcattgtccctttcccttccatcctaccagcaccaaagaaaatacatttgacaaccacaattggatcggtggcagtaaaacataaaataattttaatttagaaaacaacacaccccttgcactttttgtaacgaaattaagtttttaggttccaagctattcatcatgaagagaatgtgtttaatctgatgtgaagttggctacccaacagtctagtcaggctgtagaatgtttaactcggggtctggtaggctgccagccattctaaatgttttcacacggacaagcaataaataattaaatgtctaagtcacagttctcagattgggcagtagatagaactaaaacttaaccacttacagagacagataaacaatttttgagtggctggaatccaacaatttacctttcagttccccaggcataggcgatgctctttcagttacagtgagccagttgtggtcatgctttcttacaaggattctaaatgatcacttttgggatttttaaaaatcactaacaacctgcaatggaagataagtgataaacttcctaagccttattgtcattataaaattaggttagagaggtaagggaagacatctttttttaaaattttaaaaataagaatagagacaggttcttgctatgttgcccaggctggtcttgaactcctgggttcaagtaatcctcccacctcggcttcccaaagtgctaagattacaggtgtgagccaccacatccagccggaagatataattgataaaaatattgaaaatatacatggtcttctttccttcctcccaattctaacgtggagggtagagccaagtgtagttttaaaaccaaactactgggctgggcacagtggctcacgcctgtgatcctagcactttgggaagctgaggtgggtggatcatctgaggtcaggagttcgagaccagcctgggcaagatggtgaaaccccatctctactaaaaataaaaaaattagccaggcgtggtagcaggcgcctgtaatcccagttactcgggaggctgaggcaggagaattgcttgaacccgggaggcaggggttgtagtgagccaagatcacaccactgcactccagcctgggtgacaaactgagacaccgtcgcaaaaaaaacaattaagcccatattaaaattctaatttactcatcaaaattacagttttggaatgcatttgtatcaagatcaaaatgacattcattaaatcattcaaaatcaactggagaatggttttaactgaagaggaagataaaacaaaggagctgaccctgttaaaacctagatacttgaatagtatgttacaatttgtttaaagggccagcaaaggactcacgcaggtaaatccaaacactttgagaggccaaggcaggaggatcgcttgagcccaggagttcaagaccagcctgggcaacatagtgagactctgtctcttaaatctttaaaaattagccaggcatggtgtgctcatctgtagtccccgctacttgggaggctgaggtgggataattgcttgagactgggatatggaggcctcagtgagccttgatcacaccactgcactataacctgggcaacagagcaagactctcataaataaataaacaaacaaacaaacaaaaaacttcccagctgattttatgcacatctccactagatacttccaaggtttcttccagctctgagactccaccttcttttaaatggatgtggcctatagcttagaagcaagacccaatgctaacagaatttgggaaacaaactaacaaaaaatgcctctcccatcctcctcccccacgctttcttcagagctctttcttgacacacctgtcaacagttttgatagacagatttaaaacatgtaatgcatttgtttatagatgacctagttcatctttgctctaaaatgcatatagaagaaacactggtcagatgatcatggcagaaattaccatccagcagatatgttacaaacagaagactataaaaagctggctttgcaggactaataaatccagagtatctctagtaaaacttatgtatcttcagagaataacttagagtttttgtaacatgcttgatgtgcacaatactacactgctaacatcttatgtagacaaacgggtttatctacctgtcagggtttctcagcataagagttttaaaatttaaagtcagttctcaatatattgattccaacttgaaaaatacaaagctctcaatatttagtatagaaatatgtgttttttctatctttcacttataatttattcatagctgtttttctcattcttagaatttttaactttaggattacacaatggaacaatgctatcgttaatatagaaaccattgacaaatacagtcagaactacaaggctggaaacagaaattcatacttatattgtctttaagctgaagttaattttaaaagctttaaaaatattacagggagaaaaaacctcttaagtacaagtaaatcaagatgtaagaccaaaaaaagttacatttggcctggaaattgagattttatccattaaagcaaagtaactgacaagcaccctttgcaggaaaaacctactgaaaaaggcactgtaaatacaggaattaagaatttccttttcagagtttttttttttttttttcctgttccatagaaataacagggctatccccctaggcagtggcccagtctcacactttttcagatgtttttatagatttctatttcccagtgattgcagaaactctctgcaattatttcttgcaaagactatcagatcatccaacattagactgacagacttctattttgctgaaataacaaatcgtgtcaatagaaagtcatttttcatctccaaatactgcaataaaaacctgagatgcttcccttatgatcgatttttaatttcctaacttctatagaaatttttcttcatggtttttatatttttggcatttctaacttaaaatatctaaaactctttaagttatatgcatgaagcatttgtgctttgattttaaaaaaaagttaatatcatgctgtttgaacaatgtgagccattaaagggtatgactgtgctaccatggtattcttttttttttttttttttttgacacagagtcttgctctgttgcccatgctggagtgcagtggcgtgatctcgactcaccgcaagctccgcctcccaggttcacaccattctcctgcctcagcctcccaagtagctgggactacaggcgcccgccaccacgcccggctaattttttgttttttagtacagacggggtttcaccatgttagccaggatggtctcaatctcctgaccttgcgatccacctgcctcggcctcccaaagtgcaaggattacaggagccactgcgcccggcccatgctattctttagcacctccacgcactgcaacctgagcaaaccacttcgctggttaaagacacatctagttggtctctttccactcacagatggaatacttgggtttttttggtaggaagacagtttttggagtctaaaatatgacacaaagtaagaagcatataactaaaaccaatttaatctagttaatagcctcctcacctaggaatacattccaacatttgaaatacactagtcctcagaaccaaaagaactggtccatccataggttatcctttacaacttcaggtcataaggcacaggaagtgtggcctcagtcatgctctaggaaggactcaaaaaagagatttagaagtgattttgccacctcagaaattttcaagccctgtattaatcaatgaggtaatctttggtgtgccagcctaggctccaaaagtgggtggtctttgcagagggaggtgctcactcactctacctctggccagagccagttcctgcagctggaccaagggcagcccacagactgcactcggcacatttcttcatttctcacttgagtgcccttctttagtctcctttcaactgcccactttatatcggcttcattacaccaccgctccatttgtaatgtaaattgggaaactcggggaagtttttcttttggccttgtctacgaaagaataccgagaggtattcaaaacgtattaacacaaatcaatggcagcaataaaagcaaaatctccttagcaacataatcttgattgcaaaaggagaactgagagcatttagcagaacagtggcccacatggaatacgcatttgtctggaagaatccagcacaaagcctaaaagagagattttgaagaaatccaaaattaactcacagggaacagttactctttttttcaaaagtacacaattggctacattaaatctatcgtgtgcttttggctcagcaacattgtatcacaccgctttgcaaactgaaattacaacaccctgcatgcttcacatgagttagagggtgttttttgtttgttttgttttttggattttttttcccttggttgatttctttagtagagcaaacaaaaaagtctcaagaaatattcatctcatacacaatgcaaacaaaactgaatggctatctaacaatatctaagactgtaggtacaaaaggttgtgctatcttttgggctttctgtgatggattctaagatagtaactagtgcaagcagcaatggcattttttgcataggtctctctttgtgaaaaaagaaacaagtcacttctgagaatgctcacgtttttctggtcaggatgaaaaatgtgaataaaataataaaaattcagaaaataagttatcaattctttaaaaactacagtatgatgactcaaggaaacaagactaactcacaaaacttccctttagtttttatgtttcatatagaatcaactgtcattttgtattttaactgaaacaatccaggtgatggagttacctttactgtctactgcaaagagatgtcttagtgtactgagattctgcgtgtgtatgtgtatgtgtatttccatatatggatctatattagtaaaggtttagactggaatctgggtcaattgagtaaaatgaaaaatttgtattacaaatagtcacttgatacaatgccacagataagctatttcaaatagtgctaaacgtctatttacagaagtggcaactggaattatttctgcctcttactgaaagtttaaaaactgaaacgggataattgagaatcctatttacaagctgcattaattttaaacttaagggataactaaaacaccactgtggggaaaaaaaaggtaatattatattatataagctacatttttcccctattcttttttccaactatgatgtaagtccatgaacatataacataaaactttatttaaattcattgtacacagtttctaaactcatattcataatgacgtcaatttaattagtttttccccacacattgtacaggtcaaatctacagaagcaggtgtgtgtgcgtgtacgcattcattcatatggtcattttaacagacattattagtttggccaatttcctttaaagtgatttgatctaagttccagattcccttttccaattccaaatacactggcttacgatcttatttaatatattatattctttaaagacaaaatgctgtgaattagcccatattttagttttgaatatggaatggtgtgttgaaatgacatgttgtagtagactcacttaaaagcaacaaaactcaactagccaaagcaagccaaaactggggaaaaaaaaaaatccctagctcaaattagtctccatttgtttactaaaaaaagaacaatcaatacaatcaatgaagacttaattttacaagactaaatatactacaaccaacacaggaccaaaaactaagccaccttaaatataacccattatgtatttcttcataattatgaaggccaacaagtttttatctaacaaaacaatctcattttaagaaaaataggcagggtgtggtggctcacacctgtaaccccatcagtttgggaggctgaggtgggcggatcacctgaggtcaggagtttgagaccagtctggccaacatgacaaaatgctctctactaaaaatgcaaaaattagctgggcttggtggctcacgcctgtaatcccagacacttgcgaggctgaggcaggagaattgcttgaacctgggaggcagaggctgcagtgagccaaaatcatgccactgcactccagcctgggcgacagagtgagactctgtctcaaaaaaagaaaaaaaaccgtgtttatttggcagtgggattaatatcttaataatgaaagtaaaaacataatacataacttttacattcaactttatattttaccagttatcttcattttctaatgttactagacttacctgaatgctgtataattatctgaaagcatatttttagggaccctgctcttagttctacataagtgctcaccatcagaaatttctgattatcttatatgaaaactattccatgttcatttaaggatataaattacattagtggcaaaaaaaaaaaaaaaagatgaaggaacaaattcctggaacccttttttttttttaatggtcacatttatattataaaaaataaatctaagtatatttgtttcaaggtagcctcccattatcttctcaaaagacatgatgataaaggaaaattctatctagaataatattttttctttttctttaaaaataatttccattgtaatatataaagaatgtataaagaaagcaaaaagctgtgtgcaattcctgaccaatgcataacattcacccttgtaaaccaaagagtaggataataatgcagttatttctctcagccagtagatttcagcattttgccttccaatcatgtttgccttgcttctactgccacaaccggtaagtttcacaatactttacccttctgagagggcataatgctaataacctcaacaaacataaaaagaaatacagaatttaaaagtgctttgatacttgcgttaaacaagctcctgtttataaagacttggtggccatgtaatgagattgttctaattacctaattaaatagctgctactaaaggaagaggagttctttaatttagagcaaaaggtttcttgaggaaatactctttccttctacaatattttaaatctatacagaatttatgccaagaaaaagaaatggaaccagttatactacatcaagaaccagtagaagacacaataggatagaaactctgcagtctgagggtacgttatgtctcaataaagtagagtagacaaaacactgacccatcacttatgtctcttgaaggctgcttaacactatgtttctttaaataaacaacaacagagcaatatacagcttatttgccaaaattaaggataccgggtatggtcacttcatcaaaatactttctaagataaagagctaggaaagcaatatactggttttcataaagagaaaaaagtaatcaactcaatatcagagcaccatgtctatgaaatagaggggatataaaaaaaggcatgattttgtttaagtatctcagacgtaactatatttttaaaaatcttattagaaactttcttcaaagtactatatttaatgtttccctgatttttaaacatgcaaagcattataagtatatatagggaatacccaatctcttccactttaaatgcaaaacctgacaataattcaagtttgcgctgactttgtaaataaattgaaaaacctattcaatcattattattaaacatctaactacttacttttatataggacttaataacaggaaaataaactatcgaaaaatattgcttcacaagataacaccatgaggtagtcatagtatctccctgcttgggaaatgaaaatgaaaccaaaaaggccaagtagctggatgatcttgtagaataccagaaatgagttccaaatcaggatcaacatcctgaatttctgttttcagtactacctattaagattataaacaacctctgttacttcaatatgccattggggtgggggagataatgctccatattacagaaacagatagaattatgattaataataccaataatatttaggcttctcttaattattatctaaagatctccatagaagtgcagaacaagatacctcaagatttaaagacattcttcaaatctcaagatatattcctaaaaacaacataaagttggccatgatatcaaggaaaaattaagagttactttatttaagaaaaggttaaataaacacaaacggctatgggataattaatagtttggtttaaaattagcctattctttcctcccaaaaactaattattaatcaccttctttcaaaaacaggtttgagaagcaaccccatgtccaaccatcctattgttccctccctagaaagcgtggaccattagggtcttttcagaaggaaacatcaattgcaccactgcatcaattaagaaatctctttttaaaatgcatttttaaaatgcaagtaccaccttagcagaactgagggtgtcagccattcatcacttaatgcgacttactttaattggtcttctaaacacctacctaagaatacaaaagaattactgttcttattttgggaggccgaggtgggcagattgcttgagcacaggagttcgagaccagcctgggcaacacggtgaaacctcgtctctactaaaatacaaaaaaaatagccgggcgtggtggcgggcgtctgtaataccagttactcgggaggctgaggcagagaattgcttgaacctaggaggtggaggttgcagtcagccaagatggtgccactgcactccagcctggacaacagagtgagactgtctcaaaaaaaaaaaaaaaaaattactgttcttactgggagctttgaggaagaaagataaaaatgcaattctgaactatgttcaggcctaggtaaagactctggacatcaggaggacagcaaaagaatccatggtgtccaaaaggataaaaagaaagagggtgcaggactagatgctggagttcagtccaagacagctttaacacactatagttttgatttagtactactgattaacagcaagtcaaagcaaatatttacagtgaaacatcaagcatgcagttaaaggttataattgtgaagctaaataccacaaaagttgaaacagtctgactatgtacacagtgttatacaaaactagtagtttgaactcatgcaactgtgggtccaactgtacgtattactatttaatgtccttttacatccaaagatagagacagaatattgtcaaagatttttatggttggcctgcgtctattaatataaagaaacaaccagaagctctctaacactgaaaaaataacactaaagacaaaaccttggggaaagctggattcttcctgatttaaaattattcaattacaaaactagtttttctcataagaaaaaataatcattgtttactattattcaaggctttgttgaatttattttgttgaatttagggcaaaatgacatgtttatattttaaataaatgaaatctagtcattaaagagtcttaataaagcatctgatgatcattttagataggtaaggtgatctccatgtaagggagggccaacatctaccttagaagctaaatgtgtcacatcagttttactatagtcattaggctttggagtatcattttaacccagatagccagagttatatattaaaatataacagggttgtcaacgtacatttgttgagaaaagaatgtttctatacagaaatggtgactgattgtaaaatgccagtaatgtattttaaaaagaccataagttatttaccttagcctatgtagaatccatataccaaactttctgccaataatattttttcttggccagtttaaaaagctctacagtttatgtcccacaaactttaagtcagaaaacagaagctgaagaaaaatcatcactttaaatatttccttagactgatgtttacttaatatgggcatctctactatccagtaatgtgggcacttaaattcatggttcaagaaaggatacagttatactacaggttactaatgaaaatccaagcatgaaaatctaaatgcccaaggcataactggcttataataccacatattaagtattcacagttattttctatatatacattgaagtgtatgtttctagggaatctttaagcaaatggcacatggctgaataaaatcagaaaagcttttaaagattctatacttaatataatcaactatgaaaattatcttacagttaaaatatccctaagggaatatagtaattttaaaattattatccacagtagactaataacaggagaataaattatgtaaatagataagttcttctcataaagcttatcaatatggtgctctatggatttatacaattttatacagggaacactgtgttgcatagtttacacagtcattatatttttctgatctttctgaatcctgaggcagatttagcgttgtatgaagatacaattatttttcacactgaaaccacagaggaatactgaagtttctagatggcattatttttaattgcactactttaaggtggtaggacacaccctagatacaagttaaataaaataagtatttgagttctttgtactttgaactcttcacaggaaaagtgttctacaaattcaagttgttacttggggggcaaggaaaacatataattctcaagcaaaaaaaaatcttaaatcctagtttttaagatagctcctaatatccaagacaggatataggacatgagatactggcatttgactattcaaatttatataggattacagtactttggcaagtacaaagaaatacttttaaaaatacaggtatataaattaatgaaactggtatttaaaagatttaatacaggaaaaaagtattgtatagtggtaccaattctcaatacaaattattaagcatagtttatataattccaaaagttattaacattattgctcgataccacagttgtatggaacaagttcttgacacacattaaaacttgtataatttctggtttataaaaacaaaaatttacacataggtcattcacaaatctaaaagtttaaaaatgcatagagatatgcacaacaaaaaggagaaaaaattatatgtatttgtgtatatgtatatttaaaagaaacaagctaatctgatttaacatgtatgtcacactctcaatcaaaacaagtatacataactgtactgaaagtgaactagtggataaaaatagtactaaatgcatcctccatttcttattaacaatcttttctaaatatcaacgggatattaaataccagcttacttttagttctagaacttttgctttctttcaaaaacttttcagaaacatatatccattctataattgtgatagattggaagaaatattttccttagaaattttgtaaaggaatacttccactcttttgtatgtaagatttgataaacgataaaaacccaagtaaggccattattatcatcttgatcaaaaatatacacagatcgtgatgctactatattgtgtgatcctgagttctagtaaccactagatacatgcataccattcactgatttgtctattctaataaaaatttaatcctgtcttactacctttgaagacagaaatacttttaaaactttttgataggtcttcataacattacagattatctgccataaacagagcattaggaattgtatgagaaagggtatgttaggtcccaaaagactattaaagaaaacttactattttaaaataatgacaatatcaaatttgaaaagaaagaaaaaatgacagaaaaagtgtgcttgctggaataggtaagttgagccttacaaaggtgtttttctctgttaaggaatttataaataaaggactgtgtgtaccttggtgacaaaataaaaaaggctggccactttttatgctaagttcaaatgtatttttttgataatacaaaaaagtaatccttgaaaatcagaatacataacagaaaagagcacaataacttaagtattaaacatctgtatgaaataactgttgcaaagattgacaaaaatgcacacttagaacatgcggttatttaaaaaaaaaacaaaaacaaaaacaaaaaaaacaccacacgattctgtagaaccaatgttatgtcaccaccaggagagcaccaagcaaggcaccattggaaagacaacatacttggaaagtctctataaataaagtaaatgctaatctggtcgaaaaatcggtgtctttggtaaaaattctatgaggatgacctgtaaaaggagaagaaaaaggttttaaaagatttaaacaaaattttttcttaaaacttcaattatatgctttcacaatttttttgaaaatccattcacattttaaaacgcaactttgcattactaaaacagatctttatctgataatgcagagttccatcactgagaatttttctttttatttctggacctttaccaaatacacgaaataccttggctctatgaaaaggaagacaaataagcaagtaaaatcaccaaagtctgagaagggtgatatagatagtgcccctgatacactggaggagcaaacatgcatacatgcacgctcccctgcactcatgagaaaagaggctagtatttacttagaactaactgtataccaggtgttccatactacattgggtctctttaaacccaacaacttttctatgaggcaagtattataatccttatttcacagatgaggaaactgatgatccagagaagttgtatcacaattgaatgtggagtcactgtttgaataaaagactgtcttaactccaaagccttgccctttataccaccctacgtgactgcagctcacccaacatttttctttagactttctcctttttaatcaacccaactacatgagtcttctctaagttctagagttgctctcattttactctaccagaatatgtaatctttagataaaaggtcctttatctcttaattttttaaaaagtccatttcttcttaggttagcaaaattaaaggctaaaatttgttccaaaaggccttttaataggaaactaaaggaaaaccaacaaaaacaaaatatggtaacacagaattacacaaagtgaccagagctaatttttccaaatttgaattttcttaaattacagtcaactctttcttttgctccaaatttgtattaaatagatggtgatttaaaaattatttgattttaaaagtttctaagtctagtgaactcatcattctttttcagaaactgtgtcttgcttgatatgacctccagatttcaatacttctacaaattagctgtctgggccaggaatcttcattttcactcttcagttctcctggcttttgatctgcctcaataaagaagatacacttctatacctggctcaaaaatattcctgtcctactctaggtatcctgcactaaggcttagctgtcacatttgccactctcctgacctgtgatttgcctacaaaatattcactagctccctgttaaaatactttctcccaactagcttcttcatttgagctagattttcctgtttctcaggtttcttatctataaaataaaagcattgaactagataacaagattctttgcagctttaaaatttgacaattaaatgtttaaactacttaggagtcaacattaaataaataattttgtatttcaagtatgtcctcaatcagtctttataattttagtccccaggtatgggcatccccacactttataatatacacttttaatacataacataaaataaaggctatctttgcctacatttgaactattagtttttaaataatatattctacaaatttttccttcagaagccacacatagagactggccacttgtctcatttattctaaatcatccatctctaccatatctgaacaaagaaaagttagtgccaaggtggaatatatatatatatattttttagtatctccaatgttcaaattataatcaaggataattattttcttttaacaaaattaaattcctgtaagttaaagaaaagttgaagaaaagagggacacatggttaaaaaggcccaaattcattagataaaatgaattttatttgctagtttaacttttaaaattcatttttataaattttttaagctacattattctcactttcaactatcacaaatatatatatatactctaagaaaatccagcagaacacattttttctccccagcttattattattttttttaaagagaggtgggtattgctatgttacccaaactgtctttgtactcctagacgcaagtgatcctgctgcctcagcctccccagctagactactggcatgcccactacacccagctttttcctggcaattgaaatatttattttatctttactactcttctgggtatcttctatgatggagtgaaaataatataatggctttagcagaagtgcttaattatctaaaaattcaaggaaacttatttgacaaacaaagcatatagttcagaatgttttggaaggttataaattattttatgaataaattatagtcatatagttctatctggaattcatagcattgggataacttttatgttttcctttccaaagtaaatttagaaatgcatgaaaaaattaatacctcagttttaagcttagtgtttgtgttataaatgtagtaaatatttttttcactaaattctttacatctcctatccatccctctccccaaaatatatacataaaccctctatctaagatgaaaatacaagagtagtctcctcacctcaaaatgagttactcaaatgtgttatgattataaagaagtatcaagtgtctttctcatcatcatacattaacatgtttgatgtagtaaagataaaatctacattatttggttcattgaataaagctagtctaagacattttaaaaatattttttatgttcaaggctagaaataggatttgactgtgggataatgaaagaacaggaaaatgctaacagacaaaaatgattttatgataatttacaactaaacactgttttaatcaatattttacacatacacacgcacacatctatgatggctatattgttttaaagaatagacaaaattcctcagaaatgttgtaacaggtacttcacaaaggctctgagttttattttcaactattaacttttccttagatcttttcttttaaagtaataacctggccatatttaaaataaaatatccaagctcaaaagagaattaaaattcttaattttctagagtattctgaaattttcaaaaggagaaaaactgttcaagtaaatcatggagtcagtaaattaaatcccatgctgagtaagttctaaaattcattgtatatatatgccaaattagatattttttaacaagtaaacacaagatgatcaacatctcatctcctgcttacttttaatttttacaaagcagtattctaataacactttaaaagagattctttaaagggcactgaggtacgggcagttaaaatctataaagggtaaaggtttcttaagctccaatggcttggctgaaaggttttcttccatacttggaaacttgattagcattatataaaaaagccatatctgacttgctgcgtaaccaaagttgtggttattctttatacagcatctaaaatttcacactccatcaacacatgttcaggctattttatcttggcaattaatttattatttttcagaacacagtgaagccttgttttcaagtcattcataactttataaatcagtcttgcacatgaaaccatgcatctgtgaaccgtagaaaatccttgcactcaggagattaagctcctgacacctttgctgattaataatcatggaaagaataagatcagaagcaaaataaatgatcatttaatagagaaactcacaaaacagccctttaacttacatattccatcatgttattcgtttcacatttccttttgctcagtctccaatgcaagcacagctagacaagtaggaaagtaaaagaagaaaaatgagctctattttattgcagcacacagactaacccatttgtccacctttcatatttttagttcaacaaaagcatctgtttccatactgtgcaattcagaccccaacagtacgaagctgctccctgtggtactcaccttgtggtataacctattgttttcccattctaataacttctcaatcgatcttcgtgtctggaagacaaatgagaaaaaagtttactcttgactggttttagaaaactttgttttgcagctgctttttctgtgaaaaggggagaggtataagacagtgactgagtatagtgtggtgtgcatcactatcgatgttctaagcactaaatggtaacctgaacacaaaagagtactctttcttaaaaaagatatgcctttatttttatcatacgaatctttttttactagcctctgatttaaaactatcaaggtttaaaaagctaatgtcatctgccaaataaaattaaattcccacttctttcaaaaatgtttccaatacttaaatagtaacggaagttccttaatacatattttaaaacaaaagtaaatattagttaacaaaatgcaaatggcctttcagtaagttccaaaacaaaaaattggaatattaaaaaaatcaatgagttataaaatcaaattaattttcacatcatgcttaaaataatgcccatatttaaaagccagcttactgattattctaccaatagattttttgaacagagccaaaattttatttaaaccaacataaaagtgtcatctgatagtaaaatcaaactcttaattcaatactactgtttcaggaatcaactgagaatttacttcagttgatttttgcaagatatgctatgctgcatgaaatgtttcttgcttgagaatatgaataaaagagggtaattcatggtgccaggtgttaggatgagactgacacagctgcaggtgcaaaaatgacagtgttgccaccaggatcaacttgcaacttggttcagctgcacttttcttgcaagagaaagaaaaaaacatcttaccactattaatgtggtataaagaagtactagtaatcaaatatgaaaatttgcgtgtcaagcaaggattagctaggtgaaaaactgttaggatcaagctgggtttgaacagtttaatgttacataataaaattttaatatgtatttaaagtatctactttaaatagttacattaccttttagcatattaaacatgctaaagacacaccaaagtcacatagatgccaattataattcataactaccaatgaattacgactactgccttacattttccaagcttatgtcataaaaatcggaaaatcaactacttccctgggtaataatatgccaatgactaatttattacattactttttctgaagagtctttttggcaagaattttaaagaaaaaaaagtgcccttgttaacaatgatcagcagacctcacttgtttctttgtaaagatagccttttagaggcagctctccttttaaatgaaaatagggcagcagttatggtcacactttttgttaatttagttgccagtcagccccaaatcaaaagaaaataaggctgcagagtgtaattaacattcagttcggtcgttttgtcccttgtctagcccccaagctttgttaaaattgccatctgaatgctgaaggctgtagggaaatcgatttgattctaatcgcaccatgaaaagaacatgatctaactgctttcagccctccgtaaatctgtactaggtctttagcacaatgcaacttccaatttaaaaagcactgaatgtctcgtcaatgactttgtgaagaaaaaagaacaaggagcagacataaaaattccaatagttgtttaagcattaaagttcatttgcatcacagcgaacctgaaaagggctgacctctcaaaccgcctctcaggtctatgaagttgtagccttgacaagctcacattgacagagctcattgactctgaaaggctactctatcaatggtgaaaaatggcaataggttctactctgagcaggcatctgcctgcccacccgctgctaaaccaatggcaaaaccgattcaaaacctgaatctaccttgtaatctttctttctagggccttttaataatagattaagattactatacaatttgaggttttacttttactgatgattttgggggtgggtggatgatgaaagaactagagcagaacaagttttccaagcccactgttttatattaatgtataaaatagtacccaaaagcttaatactacattctgcaaatacttattacttaaagaaaaaaatgtagttaccaccatcatttcatcagaagtttaaacccatgctataataagaatagatctcattatgatatatagacacatacatacacacaattttaaaacttaaaaatatttactttaacttaaatcaactactagtatttgaataaaagataattacaaagtataaatcttgaattccaaaatatttaagtaggaattctgaatttcttctctgtttataattaggagtttaatgatagggcttggtataataattgtatcttacaatatttaagaattataaaacaaacaagccctgatatgccacattctgaataagcatataaatataaaatatttctacacacttcacagtctgaagtaaaagctgtgaattagcaccatctaattttgctataagacttctttcctgcttgacaggtgaaaaaaaaagcacttgcacgtgcagcttaattaatcattgcacttgacatctcaatgatttacagtgaggagcaggtgagaacatacaaaaccagaaaggaacccttgatttgagtggaacatttctagcacactaaggtgacaagtatatagattctagcagtcatttaaaaaaaaaaggaaagaaactgtgccacaaattatttgttagtaacaacaaaagctcaaattaaatagaaaaaaaaaaggttgagctactgagaatgtttaatactatgcaattattgttagttaagaaaatcaaaatatattttcaagattaaatacaataccaatttggcagatactaaaaaaaatgacacttcagcatttataaaagctacttaaaagcttttaaaagaaagcactttataattgtagtcatctagataaaagttaaagagtttatgtccacaaggctgtcaggtagctatttctaatgaaatgtaagattcaacagtgtcgaactctacacttgctaactgtggacaagcaaatctaatcatataacaacctgtccttggtttttaaatgtttatttcaactccaaattcaaaacaagctgaagcaaattaacatgcatcagaaaaaaatatgtatgggatctgtcaacatgaaacaaagtaccaaaaaacaccatctttcagtattccaggccagtttctaaaaaaataagtcatctttaattttctttaagagaatttagtgcttgtgaaaagcaccagattgatagtcatgggaactaaaaatctatttagctgaaagaacaggggaaggggcagtgcaggctttagtgtaagcttccctacagtgggccttaatccttttcactgctcacaccctgggggtgaggggacaggttagcggttctttaccaatgtaattctccgtctttctgcaaaagatgatcaacaagaaatgtaattttatcaagtattcttatctttaattaaaaggaccaagaccaccaactcacaatatgcaggaaaaacaacttttttgtgtgaatggcgtcatgttactaacctggtctggaagtagacagctccaagcatctggatcccacccatctccctcagctcactttaaataaccctttttctttaaaaaaacaaaaacaaaaacaaaaacaaaacacacatttcttcatttccacaccttagtggttatatttttctcattggtgaactagttttaatacagccattcagctttgtgaaagtaaaaattaacaggagatttaaaaaatatcatttcaattactgaataggtattaaacagacttaagttgagcaacaagtagtagtaacataagaatagaaattttggcttctatttatattgcctttggtcccttttagatttttggtagaattgtgaaaataggaaaaacatgaaaacggaaagagaactaaaagggcctcagtaattcataaaatggctaatatggtaatgattaatcagcaatattagataagacatacccaaataagacataccttccaaagaagcatctaaagtaagcttataacagcaaagcacacatacacctagacaaactcaattactgcaatagaaaactaagatttcctgaaaattcaaatttgaattattatgtatttttgtaatttttcctaaatactgtaactttcttaggaataaattattaatattattccctataaacaaattaaatgccattagatataaattagtcttccaggacagcaaagagccatttagaaaatctttaaggtattaatctcctactttgccaccactggttacttaagagtttcctaattcccaatgactcatttaatcacaatcaattgtttgaaaacatggttttacaaagaagtggttttctagacattactaataaaaccaatggaaatctcataaattttagagtattgagagctaaagaaaaaaaatgttaagtgtagaaactgtaacaaagtttatcttaatatttcccaataaaatagtattatcagtctttagaacaaaaatatgctatgatatgctaataaaatgtacagaatactcactaataactatttataaaagttcacctatttaaacctataattaaaatgtatttgaattggatttattcataccatcacaaaatgggaaagcaaaatttcaaatgttcaattccctacttaaattttaaactcttaaatctataatgcattaattaacctttaactaaaatgttttgaatatattcataatcttgtttttaacttatatttttcaaataagaatgctattcatctttagacatctgtgtaaattgaatttgttaagtaaaacaatgtctttagctgtaagttattagggagaaaccatatataatttaaaatgaattattttaacataagagaacttaagaggaaattatattattcacttctgctcattctggattaatatgaaattttatattccagtgatgtgcagaaaattaaataattatatcacagtattatgctacgtgaaaagcctagattcaccaaaaaacaaaaaaaaactagaatatgatttctcaaaaggatttttaaacaaattcctttcctgtacattaaagcaccttttaaaattttaatatgaacattaacttttaaataatctagatatattaaaacacccactgaagtatcatgtgctatttgttaaaagtaatatttttagatagaaatacgctaaaaaaaattgctaaaattttgtgaatcaaaaatatcctctagtactgagcagtgtcttaataggtgctaatcttaaacagaatttcatcaagtttacgatctaggctagtgagagaatattaacttgtttaggttatactggttatgaattatgaaagatagggattctctctctgcagaaaaaaagaaacatgtacacaaacatgcacaatttaaagggggttatctactaactctgagtaccatttcagaaaatactaacattttaaaaaactaaaattaagttttgaggtccccatctgacccatcttctgcctgacctatttccactaagcaatcatcccactcggtctcaaagggttcttttggtttcaataatctagtcaaataaaaatgcgcttgggttggggcagggtgcaggaagggtctccttgaatttgggcagcaaatatgtcactattattgttaaaaaaaaattatccaaaaaattaagagataaaaattaataaatatagtttcaactgaccacagaatattagaaaaactgttcataagacaaaggaatttcactatgcaaataaaataaaaagtacggctatcaggaatttttaaaaatatatgtaattacaaaagaaagaatcagtgcttactgtcaggcctctgagcccaagctaagccatcatatcccctgtgacctgcacgtatacatccagatggcctgaagcaactgaagatccacaaaagaagtgaaaataaccttaactgatgatactccaccactgtgatttgtttctgccccaccttaactgatcaacgtgctttgtaatcgcccccacccttaagaaggttctttgtatttctccccacccttgagaatgtactttgttagatccaccccctgccacaaaacaccactcctaactccaccgcctatcccaaaacctgtaagaactaatgataatcccaccaccttttgctgactctctttttggactcagcccgcctgcacccaggtgaaataaacagccttcttgctcacacaaagtttgtttggtggtctcttcacactgacgcgtgagacatttggtgctgaagacccgggtcagagggactccttcggaagaccagtcccctgtcctcgcctcactccatgaggagatccacctacaacctcgggtcctcagaccaaccagcccaaggaacatctcaccaatttcaaatcgggtaagcggtcttttcactctcttctccagcctctctcgctacccttcaatctccctgcccttccaattccagttctttttcctctctagtagagacaaaggagacacattttatccatggacccaaaactctggcgccagtcacagactcgggaagacagccttcccttggtgtttaatcattgcagagacgcctgcctgattattcacccacaattcactggtgtctgatcactgcagggacgcctgccttggtcattcacccacattcccatggtggcaagtcaattgcggggatgcctgctttggctcctcacccacactgcagcccagggctgctccccaccaccccgcttctccgtgtctctacctttctctttaaacttaccttcttcactatgggcaaccttccaccctccattcccccttcttctcccttagcctgtgttctcaagaacttaaaaccccttcaactcacacctgacctaaaacctaaatgccttattttcttctgcaataccgcttgaccccaatacaaactcgataatggttctaaatagccagaaaatccattttacaagatctagataatttttgtcgaaaaatgggcaaatggtctgaggtgcctgacatccaggcattcttttacacattggtccctccctagtctctgctcccaatgcgactcatcccaaatctttcttctttctctcctgtctgttccttcagtctccacaccaagctctgagtcctttgaatcctccttttctacagacccatatgacctctcctccccaggctgctcctcaacaggctgagccaggtcccaattcttcctcagcctctgctccccgaccctataatctttttatcaactcccctcacacccattctggcttacagtttcattccgcgactagccctcccccacctgcccaacaatttcctcttaaaaaggtgactggagctgaaggcatagtcaaggttaatgttcctttttctttatccgacctctcccaaatcagttagcgtttaggctctttttcatcaaatataaaaacgcagcccagtccatggcccgtttggcaacaaccctttgacgttttactgccctagacccacaggggccagaaggctgtcttattctcaatatacattttattaaccagcccactcccaacattaaaaaaagctccagaaattagattctggccctcaaaccccacaagaggacttaattaacctcgccttcaaggtgtacaataatagagtagaggcagccaagtagcaatgtatttctaagttccagttccttgcctccactgtgagacaaaccccagctacattgccagcacacaagaactccaaacacctgaagtgcagctgccaggggttcctccagaacctcttccccaggagcttgcttcaagtgccagaaatctggccactgagccaaggaatgccctgcagcccgggattcctccttagccgtgtcccatttgtacaggaccctactggatatcagactgtccaactcgcccggcagccactcccagagcccctggaactctggcccaaggctctctgactgacttcttcccagatcttctcagcttagtggctgaagaccgacgctgcccgatcgcctcagaagcttcctggaccatcacagacgctctgggtaactcttacagtggagggtaagtccgtctccttctaaattaatatggaggctacccactccacattaccttattttcaacgacctgtttcccttgcccccataactgttgtgggtattgatggccaggcttctaaacctcttaaaactccccaactctgatgccagcttggacaacattcttttatgcactcctttttagttatccccacctgcccagctcccttattagatcaagacattttaactaaattatctgcttccctgactattcctaagctacagccacacctcattgccacccttcttcccaacccaaagcctccttcacatcttcctcttgtatccctccaccttaacgcacaggtacgggacacctctactccctccctagcaaccgatcacatgccccttaccatcccattaaaacctaatcacccttaccccgctcaatgccaatatcccatcccacagcacgatttaaaaggattaaagcctgttatcacttgcctgttacagcatggccttttaaagcctataaactctccttacaattcccccattttaccttgtcaaaaacctgacaagtcttataggttagttcaggatctgtgccttagcaaccaaattgtcttgcctagccaccctgtggtgccaaacccatatactctatcctcaatacctccctccacaacccattattctgtcctagcaaacctagctgaccccatagatcctaattcctttcgccactcctctttccattccttaaaaacagccctagaagctgccaccacgctagctctccctaactcatcccaacccttttcattacacacagccaaagtactgggctctgcggtcaaaattcttacacaagagccggaaccgtgccctgtagcctttctgtccaaacaacttgaccttactattttaggctggccatcatgtctccgtgcagaggctgccgccgctctaatacttttagaggccctaaaaatcacaaactatgctcaactcactctctacagttctcataacttccaaaatctattttcttcctcccacctgatgcatatactttctgctccccggctccttcagctatactcactctttgggtctcccacaattaccactgtttctggcctggacttcaatctggcctcccacattattctggataccacacctgacccccatgactgtatctctctgatccacttgacattcactccatttccccatatttccttctttcctcttccccatcctgatcacactcagtttattgatggcagttccaccaggcctaatcgccactcaccaacaaaggcaggctatgctatagtatcttccacatctatcattgaggctaccgctctgcccctctccactacctctcagcaaggcgaactcatgccttaacctgagccctcactcttgcaaaaggactacgcatcaatatctatactgactcgaaatatgccttccatatcctgcaccaccgtgctgttatatgggctgaaagaggtttcctcaccgtgcaagggtcctccatcattaattcctctttaataaaaactcttctcaaggccgctttacttccaaaggaagctggagtcattcactgcaagcaagggccatcaaaaggtgtcagatctcatcgttcagggcaacgcttatgctgataaggtagctaaacaagcagctagcgttccaacttctgcccctcatggccagtttttctccttctcgtcagtcactcccacctactctgccactaaaacttccacctatcaatgtcttcctacacaaggcaaatggttcttggaccaaggaaaatatctccttccagcctcacaggcccattctattctgtcgtcatttcataacctcttccatgtaggttacaagccgctagcccatctcttaaaacctctcatttcctttccatcgtgaaaatctatccccaatccaccactcttgcctccctcttggagtggatagatgatctttgctgacagaacacactccaatactttcaccctgatgaagtcttattctttacttttatactcattcttattcttgttcccgttcttatgccacccactacctctccccagctatctctatcacactatcaatcgcactcactctctcctagccatttctaatccttctttaacaaacaattgctggctttgcatttcttttttctccaaaatcaccgaggccctgacttactcactgctaaaaaaaggggactccgtatatttttaaataaagagtgttgtttttctgtaaatcaatctggcctggtatatgacaacataataaaactcaaggatagagcccaaaaattcgccaaccaagcaagtaattatgctgaacccccttaggcactctctaattggatgtcctgggtcctcccaactctcagtcctttaatacctgtttttctccttcttttattcagaccttctaacttctgtttagtttctcaattcatacaaaactgtatccaggccatcaccaatcattctatatgacaaatgtttcttctaacaaccccacaatatcaccccttaccacaaaatcttccttcaacttaacctctcccactctaggttcccacgccgcccctaatcccgttcaaagcagccctgagaaacatcgtccattatgtctccataccacccgcccccccaaaatttttgctgccccaacacttcaacactattttatgttatttttcttattaatataagaagacaggaatgtcaggcctctgagcccaagctaagacatcatatcccctgtgacctgcacatatacatccagatggcctgaagcaactgaagatccacaaaagaagtgaaaatagccttaactgatgacattccaccactgtgatgtttctgccccaccttaactgatcaatgtactttgtaatctcccccacccttaagaaggttctttgtaattctccccacccttgagaatgtactttgtgagatccacccccgcccacaaaacattgctcctaactccactgcctatcccaaaatctgtaagaactaatgataatctcaccaccctttgctgactctcttttcagactcagcccgcctgcacccaggtgaaataaacagccttgtcgctcacacaaagcctgtttggtggtctcttcgcacggatgcatgagacacttaggaccaacaggtagaaaaggggtaaaggccgggcgcaatagctcacgcctgtgatcccagcactttgggataccgagaagggcggatcacttgagcctagaagttcgagaccagcctgagcaacatggtgaaaacccatgtctacaaaaattacaaaaatcagccaggtgtgatggtgctgcacacatgtggtcccagctacttgggaagctgaggtgggaggatcactcgagcctgggaggtcaaggctgcagtgaacgtgtcactgcactccaccctgggcaacagagtaagaccctgtctcaaaaaaaaaaaaaaaataggaattgttttaaaaaacaagaagaaaggggtaaaagaaaatcacctgctgatggatgataacacaactggagaaacaagaagagataaggaaccagcatttgtggatcctcactttgggtctgatcccatgttgtgtcttgcttttattaccttacttaatctgcacaacaagcctatatggcggcttggactactttctttttacatatgaaaactaaagcttacagaggtgaagaaatgtaaatctatactaggaaatgatggagctcggatctgaaaccaggattaaatggccttcaatttcctgttcttttcatcatgctatagaactattataatactatcacaaaaaaacaatttttttgtttttttttgtttggctcacacctgtaatcacaacactgggaggtggaggtggatggatcacttgaggtcaggaatttgagaccagcctggccaacatggtgaaaccccaactctactaaaaatacaaaaattagccaggcatggtggtgtgcacctgtagccccagctacttgggagactgaggtaggaaaactgcttgaacccgggaggtggaggttgcagtgagccaagagtgtgccactgcactccagcctgggtgacagaatgagactctgtctcaaaaaaaaagaatttttgtcaagaacttttcttttttacagatatgttatggatattttacagatattattctgagatgaataaaggaatggccctagtatccatctactaaacaaagctggaaaacagagataataaatctttatacacctcctcctctgcccttcaccttttttatttcctagtatgccaaactctgacagtttttgtcttttaagtttcattttaatctgtttacttctctttcttgtctacttttatgcctttctcttcttgactaatgcagtcacttcactaaatccacccttcttcctttcactttaaaatcttaatggtttcatttcaattatattttacatacatttgttgttaatttcaaggccattcatgattttataatgaaaaatttttgtaaatcgaacttttttacagatattatcctgagacaaataacatatgtatgacatgcaagttttcttagccactaacaaggctatcggccttgaataatcaacttactctaaaactatgattaatgtgttcaagaaaagaaagtagaaagctggatgaaaaaacgaagaatttcaaaagaaaactggaatctattttaaaaaacagcaaatggacaccctagaattgaaaaatacagtatctcatattaaaaactcaggtcacagaagataggtgcaaatccttctataaaccaccacaccaatactatgttctaaatatttacagagaaatgaatgtcagccagctgttgacaaaacacattttctaagcattctagcatatctttacagtgctacctctgcatttttaaggctcaaagtttacatttttatgagtatcctcttttatgatgaaaacttagtaatgcggtttaattttaattaaaaacaaattgtcactagtgttcataataatggcagtaatttacataagaatctgtttaagtttcaaggccaaagcattctttaaaatggaactgcagtaaatgtattcatctagttatgagaaatcttttatgcaggaccccttttgtaaagggactgaaataagatttcaaaaaggtcaaacctatttcattattctgtatcttataatggggaagatagtgaagaaggggcaagaaaccacaaattaaatgcctagggctagataaagaaaacccagttctttcattcagagttcctgtcccatctttactgcatgggacatgcactcattacatgtcattctcaatctctctaaaagtaaatacacaagtttcaagaaaggatctaatactagaagaaaaataactttaccagaagtcatgtaaacttatttgctagggagtaggaacctaataaataacttttcaaagacaggatgttgattttcatttgtttttataaaagcaaaacagaagcaaaggcaatatatcaactcttggttgtccaactataactttgtataaaatctgcttaaaatgtatatttttctcctatacccactttacctgctttacagtttctttcctttactgtttgtgtcttcaagaaatacaaacttatttaaatattaagaaaaaatacttacaaagaaaaatctgctaaacaactaaagtactgcaaaagttaatataataatgcttggatattgttaccatttatcaatcaactggacaaattaggtaaattataacccataggcctgaatttcctaactcatgaaatcttttaaattccttccaaagctctaaaacctctctctctgctggtaggtataaagtcaaattttaataataaaaaatagcttgatttttgtagctctttaaaatagcaggaaaagcatgaaattttgagctgtaagattggaattctagtttggcttaactttataaactgggagatctcaaataggttacttgacttctgagcctcagttttctcatccttaaaataatctgaatatctgatttgtaattttgtaagaatacagtacatgtaaattgattaactccatcactggtaaagagtgagtaaggactcaactttctgatgttaccatgatattttccacatagggtgttatgaagattaaattaaaagagaatgtatgtaatgtgccttgctaatagccggtatacaataattatctttctcttcatttgttccttgtagtctattatttcattgcatatcaacacatattttccattttatagcaaaatctttcaagttaaacatcaggaatttagccatttggaataactggtattataaactaagtgtttctatcttaaattacatttaagtaggtgcaaaagtcaaacatcgactgggcgcagcggctcacgcctgtaatcccagcactttggggggccgaggtgggcagatcatgaggtcagaagattaagaccatcctggccaacatggtgaaaccccgtctctactaaaatacaaaaaattagccaggcgtggtggtgtgcacctatagccccagctactctggaggctgaggcaggacaatcactcgaactggggaggtggagattgcagtgagccaacatcgcgccaccgcactccagcctgctgacagagcgagactccatctcaaagaaaaaaaaaaaaaaacaaaagtcaaatatcaaatatgatgtgaaaggttttattaagtgtaaaagaaagatgtttctgatttaaatacaaaccataactcaagtttgtttctctaaatttactggacagaaatttctctatgttctattttatattgctaagtctatcactgtacattagaacagtataaacatcctctgcacaagaaagatcaggttcctgaaaaacctctggaataaaatcatatgaaagacaagaaatatagggtaatgaagattaagaccattattgaccacatgaatatttgttatatttaccaaaataaggcaaattgaatagcattctaaaaaaatagcattgattttccacatcttcaatcaataacaacagcagttataagactacatttcattcatcattccttgttcactagaaattactttggattctcacttcactagaatttcaatataatttcaaatttgttctgccttgttgcaatatctgtattatgttgttagaggtatttttctttatctgattcttcatctaaatgtttctttctcattttatgactcagagttactgactataaatggtcaatcccaaacacagagtaaatcagttctgaaagttttggataatttttaatacatcggtataactgaataaggatattttatattcctcccatataccaatattcttagctttctgcttatgattcccccaggttcactttcctttgaatttctttaagtcttacaaagttgcattctaacttaaaaacaaaactttactattcacttctcccatttagattctcaacactactatacccctaaccagagtaagtcacaattattggataactaaacttgaacttgagagcaaagatattcagaagaaacataagtaaactagaatctcaactaaaaaaaaatacagtgaactggattaccatttatttgtatgcatacaaaatactttacatgagagaaatacaggcatcttagcaaaggtttcaaaaactaaatagcaattatctttaaaaaaattcagaaaagaaaaaacctaagaaacctatattaaaatatttattacaatgatggccaggtgcggtggctcatgcctgtaatcccagcactttgggaggccgaggctggaggattgcttgaacccaggagttaaagaccagctggggtaacccagagagacctcatttctacaaaaatgttttgttttaaattggccaggcatggtggtgtgtgcctacagtcccgcctacttgggagggtgaggtgggagaatcacttgagcccaggaggtccaggctgcagtgagccatgatcatgccactgcactccactctgggcaagagagtccctatctcaaaagaaaaaaaaaaaaaaatatatatatatatgtatacacacacacacacacacatatacaatatataaatgtataaatctatatttataaaatatataaatatatatacacacatatatatatgtttatatttactaaaatgctaattttttttttttttttttgagatgaggttttgctcttgttgcccaggctggagtgcaatggcacgatctcggctcactgtaacctctgcctaccaggttcaagtgattctcctgcctcagcctcccaaagtgctgggattacaggaatgagccaccgcacctggcctaaaatgctaattcttaggctttaaaataaaaattaacattgagaatttttttttttttttgagacggagtctcactgtcgtctaggctggagtgcagtggcgcaatcttggctcactgcaacctttgcctccgcctcccaggttaaagcaattctcctgcctcagcctcttgtgtagctgggattacaggtgcatgccaccactcctggattctttttaaagcatggaaatagaaatagtttatagacctacaaagctcaattttcagacgattacacatttttggaactggaaaatatgtgaaaaatcagctggcctgtcctttgctcagattaaaaggaaaggaaaaaaaaaaaacctaacgctgagagaggttttaagcaactctctcaaggtcacccagcttcaaacattggtttactatcctttatactgtatcacactgctcctacagcagtaggagctcctattacttattctaaaaggcaagatgcttctatttatcagggaatcttcttcttattagtaagcaccatatcttatgcaacattatgatcttactaatgccaggattttaaaggccagatgaatacatttattcaacaaatatttattgaacaccaagtagatgctaggcactgtgacagcactgaggatacagtagttaagaagacaaacactgagaataataatactaaaatgataataacagtaactacattgaactaagcacctactatgggcaaaatactatattaagtagcctagatgtacttgctttttttttttttttttttttttgtgagacagagtctcactatgtagccttaggctggagtacagtggtgccatctcggctcactgcaacctccacctcctgggttcaagcgattctgctgtctcagccttctgagtagctgggattacaggcacgtgtcaccacgcccagctaatttttgtatttttagtagagacggggtttcaccatgttggccaggctggtcttgaacgcctggtctcaagcaatccacttgcctcggcctctcaaagtgctgggattacaggagtgagccacagtgcccagcccacttgctctaattcttaaaacaacactacaaagaagggtttagagtgagtggtttgataagtgtcacagtccaatccagctagttctagcaccaaaatgcaagttctagccaccacatgttacaggccacttccctattcctaaatgaatgatttcctgatacaattttaaatataaataaaagcacaaaggaaatgaaaatatgcaatatttttaataaatccatatagggaccacttttagaaagtggcataattctggttagcatatctaaaagagtaaagcatttttataaaggagataagacaactaacaaggttaagaagttggtgtatcctctccctccccctccccctccccctccctctccctctacggtctccctctgatgccgagccgaagctggactgtactgctgccatctcggctcactgcaacctccctgcctgattctcctgcctcagcctgccgagtgcctgcgattgcaggtgcgcgccgccacgcctgactggttttcgtatttttttggtggagacggggtttcgctgtgttggccgggccggtctccagctcctaaccgcgagtgatccgccagcctcggcctcccgaggtgccgggattgcagacggagtcttgttcaaagtaaatttcagagaaaaatacaggtcaattttataatgataaagaggtcaatcacaaaaatcctgaaaatttatatacctaattacagagtgccaaaatacatacagcataagctgcatgaataaatacacaaacccaaaattatagtcaatccatagaaatgcatttaaggaactgagaaactgccaaaagtggaagtactattattttatgatctcacactactgtaggatagattctgctctgctacatacttgtcaacatttagtatagtcttttaaagagctggggtatgtgtcccctctaaatctcatgttgaaatgtaatccccagtgttggaggtggggcctcgtggaaggtgattggatcatgggggcagataacttcacaggttggtgctgagttctctcaagatccggttttttaaaagtgtgtggcacctctcccaacccccttgctcctgctctgccatatgagatgcctgctccttttcatcgtccaccatgattataagctgagtcctccccagaagctgagcagatgccagtgccatgcttcttgtacagcctgtagaaccatgagccaattaaacctcttcattataaattatccagtctcaggtatttccttatagcaatgcaagaacagactaacatagtctttttaatttcagtccttctaataagtatgtaatgttatcattatggttttaatctgcatttttcctaatggttagtgatgttgagcatctgaaaaaatgctaatttttcatttacatatcttttttggtgaggtgtctgttctaaatttttgctcaatgtttcttgaattgttttcttattgttgagttttgagaattctttatatattctggacaaaagtatctgctttgcaaagatttctcccagtcagtagtttgtctttaaatcctccaatagttttcaaaaacggaaatttttaacttttatggagtccaatttgtctggtgttcttttagggattgtgctgctaatgttatacctagtaattcttcctaagcccaggtcacaaggatttttctcctatgttttcttctagagttttataggtttaggttttacattttgagttaaactttctattaatatacggtttaatgtacagattgaaggattttaaaaatatatataggcatttaattttaccaattacatctctttaaaagactgttctttctttactgaattgcctttccacctttggtggaaatcagttcataaaggggtctattttttggctctgtctcttctgtttatctgtttgtctatcttgatgcgagtaccacactactttgagtattgtagctttataattatgtcttgaaattgggtagcgttggttctccaactttgtattcccttttcagagttgttttgcttttgtaggttgtctgtattccatatgaattttagaatcagtctgtcaatttctaaaaaaaaaaagtcctgctgggaatttagtttggattgcactaaatctatggatcagtttggagaaattggccacttaaaagtatttcctcgccagacgcggtggctcatgcctgtaatcccaacactttgggaggctgaggtggacagatcacctcaggtcgggggttcgagaccagcctgaccaatatcaagaaaccctatctctactaaaaatgcaaaattagccaggcatggtggtgcatacctgtaattccagctactcgggaggctaaggcaggagaatcgcttgaacctgggaggcagaagttgtggtgagctgagatcacaccaatccagttcagcctgggcaacaagagcaaaactctgtctcaaaaaaaaaaaagtatttcctcttctgacacaagaaccaatattttcccccacttacttaagtcttttaagtttttttctgagtggtattttgtagattttagtgtgtcttatatatgtttttttcagctttctctgtaagtacctagcatttttatgctacttaaaaattgtttttcattttaattttttattttttgttgatagggtatagctttgctaaactcacctgttagtttcaagagtttctttaaagattctattgaattttcttcatagacaaacatgtcatctgcccatcaagacagtattattactatacttgttgctttttcttgccttactgccctggctagaatctccagaataacattgattagtagtagtgagaacatactcttggcttgttcttgatcttagaagaaatgcattcagaccttcattattaagtgtcatgttaattgtagggtttttgtagatgtcctttatcagcttgaggaagttttattctattaggctgtgagagtgttaatcaagtatacatgctggattttgtcaaatgctttttctgccactttagagattgttgtgtggtttttctttttagtttagaaatatgttgagttacattcattgcatttttggatgttaaaccaaccttacttaccttcctgggaaggacaatgtacttggccatgtgtgtctttcttttcatgtttttgttggacttgataggctaaacgtctgtttagaagttttatatctatgttcatgaggaacatttttctgtagacttttcttttagaatatctctgtctggttttggcctcagggtaacgatggcctcataaagtgagctgggaagggttcttttctcttgattttctagaagagtttgtgtagaataggcattacttcttccttaaattttgtaagaatacaccagtaaaggcatctgggcctggaattttctttgttggaagtttttaaattacaaattcaatttacttaattgatatgggacttttcaagtcatctattttatcttggttaagctttacagtttttgtttttcaaggaatttgtccactttaaggtgttgaattacaggcatacagtttatagtattcattaatcattcttttactatctttaaaacctcttagtctcatcacctgtttcattcctgaaacttaatttatctctttctttctcttttccccactctggctagagatttattaattttattgatcttctcaaaggtttgattatttctattgattttatgctttatatttcataggtttcagtctgaccattatttttttccccctccttactttggatttaatttgctcttgtttttctaatttcttaagatgaaaacagaggtcatggatttgaggctttctagtgtagactttcagtggtataaatttccttccttgaacactgctttagtagtatgacacaaattttgacattttgtgttttaatcttcatttaattcattctgcttttaaatttcccttttgatttctttgaccaatgagttatttagaagcattttatttagctttcaaatatttgggaattttctagcgatttttcatttactgatttttaatttaattttattgtggtcagataacccactttgtatgttttgaatccctttaaatttattaagacttgtttaattactttgaataagaactatctcagtgatctgtatgtacttgaaaagaatgtgtatttgcctattgttggttagagtgttttataaatgtcaattaggttaagttggctgacatctgtagggattttctgtctactagttctatcagttatcaagacagtggtactaaaatctcgttaggctgttcttgcattgctataaagaaattcctgagactagataatttataatgaagaggttttattggacaagctgtacaagaagcatggcactggcatctgctcagcttctggggagtactcagggagcttataataatggtggaagatgaaaggcagcaggcatctcatatggcagagcaggagcaacggggttgggggaggtgccacacacttttaaaaaaccggatcttgagagaactcagcaccaacctgtgaagttatctgcccccatgatccaatcaccttccacgaggccctacctccaacactggggattacatttcaacatgagatttagaggggacacataccccaactctttaaaagactatactaaatgttgacaagtatgtagcagaacagaatctatcctacagtaccatgagatcataaaataatagtacctccacttttggcagtttctcagttccttaaatgcatttccatggattgtcccacaaccacaaaaaaaaagaaaggaaaggaagctaaacatacactgacatatgaccaaggcattccactcaggaatttttactcaaaaaaaaaaaaagtgtatgtccccaaaaagacctgaacaagaatattcacagcagctttatttatacagaccaaaatgtccatcagcaggtaaatagataaacaaatgtggcatatccatataataaacattattcagcaataaaagggaatgaactactgatgcaacaacattgttgaatctcaaaatcatagtaagtaaaagaaaaaggggctggccaagcacggaggctcacacctgtaatcccagcactttgggaggctgaggcgggtggactgcttgagctcaggagtttgagagatgaaaccctgtctctaccaaaaatacaaaaattagccaggagtggtgatgcgcacctgtggcccaagctacttgggaggccgaggtaggaggatgagtggagcctgggaagtctgggaaggctgtagtgagccatgatcatgccactgaactccagcctcagtgacagaatgagaccctatctcaaaaataaataaataaaaaataaaacaagaagacaaaaaagaatgcacattgtatgatttcatttagataaaactctagaaaaagcaaattaatctatagtgccagaaagcagatcagcacttgcacagggaagtttctggaaatgatgagtatgttcactatcttgatgcacacaagtgtatcaaaactcatcaaataatatactttaagtatgtgtagtttattgtatgtcactgacacttcaataaagctagtaaaatataaataaaagttttgaacatgccattaccaaaatacactgtattcaaggctgtaaaataaaacacatttaaaagaactgatatcacaccaagtatatgctttaacagtaataaaattaaactagaaatcagtaacagaagagtttctggtaaatctccaaatatttggaggttaaacaaacttcttgataatccatgactcagagagaaaatcacaaatactttgaaccaaaagaaaacaaaaatactatataaaaatgtgtaggatatagtcaaaacagtgctttagagggaaagagcattaaatgcttatacaagaaaaaaagaaaagacaaatcaatgacttctaccttaagaaactaaaaaacaagagtaaattatatccaaagcaaggagaagaaataataaaaacaaaaaatcaatggaagtgaaaacagaaaaacaacacagaaaatcaagaataaagcaaggagtttgctctcatcactcctattcagcattttattagaactcctacactgtgaaaaagagaaggaaaagaaaaagtacacagattgggaataaaactgtcattattttctgacaacatagttatctctgtagaaaatcccaaggaatctacaaaaaagttcctggaatttaataagtgaatttggcaaggttgaaggacatgacgttaatatgcaaaaatcaactgtattttatgtactagcagtgaacaactggaaatcaaaatttaaaaaacaataccatttacaatagcgccaaacccaaagaaatacttatgtataaagctaataaaacatgagcataatctatatgctacgcaaaaaactacaaagctctaacaaaaaaaacgtcaaagacctaaatacatggagactatgtcatgttcttggtttagaggacttaatattgttaagatgtcaattctctccaattcatctgtaaattgaatgtaattccaatcaaataccagtgtttcttatagatatttgacaagctaattctaaaatttataaagaaaggtaaagaaattagaacagccaaaacaatcttgaaaaataagaaaaaaattgaaaggctcaatatacctgatttcaaaacttactataaagctacagtaggctggacacagtggctcacatctgtaattccagcactttgggaggccgagatgagagaatcgcttgagcccaggagttcgagaccaacctgggcaacacagcaagaccctgtctcctttttaattaaaaaagaaaaaaaagctacagtaaactagacattatgatatttaatcaagatagacatacaaatcaatagaacagaatagagtatggaaagagacctacacaggtattgttgactgatttttgacaatgtacaatggcaattcaagggaaaaaggatagtcttctcaacaaatggtactggaaaacctagaaagtgatatgcaaaaaaaaaaaatttcacccatacctcacactcatataaaaacctgagtcaaaatgggtcacacacctaaaagtaaagagatcacaggagaaaattttcatgaccttggtttaggcaaattcttagatacagcacaaaagtacaatctatttttttttaaagcgatgaattcatcaaaagcaaaagcttttgttccgccgaagacattgttggagaatgaaaagacagctacagactgcaaatatatattagcacgtatctgccaggggacttattttcagaattatatgaagaactctcaaaactcaacaagaaataacaatttttaaataggcaaaatatttcaatgaacactttaacaaagaggtacaaatggcaaataagcacatgaaaaggtgctcaatatcattactcatgagggtaatgcaaattaaaaccacaatgagatgctactatgtatcttttagaatgactataatttctataactaaccatatcaagtcctgcaaggatgctaagcaactggatctctcatgcattgctggctggaatgcaaaatggttcacccactttggaaaacagtttggagattttttataaattaaacattcacttaccatataacccggcaatccccttcctaaaaatgaaaacttgtgttcacacaaaaacatgcatgtgaatgtttatggcaagctttattcaaaaactggaaagtcagtgtcttcaactgataaatggataaacaaactgtgatacatccatacaatggaatactactcaacaataaaaaagaataaactattaatacataaaagaaaatagatgaatctcaaatgcactaagctacatgaaagaagccagactcaaaaagttatatacactattttactccatttatataatattctagaaaagacagtattgtagggatagacaacagatcactggttgccagggtttaagagttgacgagggttcaactacagaggtagtaagtaaaaaacttactacagcacaagtaagttttttatggaaaactgttatgtatcttgattctggtggtggttacaaaactctatgcgtttatcaaaaatcacagaactgtttataaaaattttactgtatattaaaaaacaattttcaaaaataggcaaaggtagttaagaaaaaaggcaatttggaaggtctaaaaaataatcaaaataacagaacatgctgggcgcagtggctcacgcctgtaatcccagcactttgggaggccgaggcaggcagatcaccagaggtcaggagctcaagatcagcctggccaaaatggtgaaaccccgtctctaccaaaaatataaaaattagccgagcacggtggctcacacctgaatctcagcactttgggaggccgaagcgggcagatcacctgaggtcaggagttcaagaccagcctggcaaacatggtgaaaccccgtctctactaaaaatacaaaaattagctgggcatagtgtcaggagcctgtaattccagctactccggaggctgaggcaagagaatcacttgaaccggggaggtgtaggttgtgatgagctgagagaccacaccactgcactccagcctgggtgataaaagtgaaactctgtctcaaaaaaaaaaaaaaaaaaaaaaaaattagctgggtgtggctgcaggtgcctgtaatcccagctactcaggaggctgaggcaggagaattgcttgaacctgggaggaggaggttgctgtgagtagagatcatgccattgcactccagcctggatgacaagagtaaaacaccgtctcaatcataataagaataataataatagaacagaataaaaacaaggtcttgggaataatatcaggtcataaaaagagggcactaagttggggatagatttttttttttttttgagacggaacctccaactccctggttcaagcgattcttctgcctcagcctcccgagtagctgggattacaggcacgtgccaccatgccagctaatttttatatttttagtagagatggggtttcaccatgttggccaggatggtctcgatctcctgacctcgtgaggggatggattttgaaggcaagacagaactgcagttttccaaatcagtgaataatgtgaagaaagtaaaagcactgagctgcatatcaagtatgcctttggtcctgatttgtcttagagtctgagaccattctaaccacataagaggatttcacatcacaagaaagaaaacagaagttcacaggctggcaattttttatactcatgcctctcgatcgagggttcttaacatacagtacctagacagaattctgggaatctgtgaaagtgagtgaaatgaaaatacatctttttaaccactaactgaaatgtattacatttccttaggttatgaatgtatgcaactaactgcaatagactgaacaggacctgcaccttcatcacttaaagaaatcacagattcttcctatcatatcattattatcatggatttgttgctatctcattttgtatgcattaataaacatatttataaaccacattaaagttttctagtattttgataactatattttatataattggtttcctctgtaatccatgtatttttaccttatgcatttagaatacattaaatatttttaaatatatgtaaagcatctaagaaagcattcataggcttccctaaaccatcaaaaggatttatggcaaataaaacgttaaaaatccctgctctagaggggaacatcacacactgggacctgtcaggggttgggggctaggggagggatagcattaggagaaatgcctaatgtagatgatgggctgatgtgtgcagcaaaccaccatggcacgtgtatacctatgtaacaaacctgcacattctgcacatgtatcccagaacttaaagtataatttaaaaaaaaaaaaaaggaaaaaaaaatccaaattattttgcctccatcttacaaagcacctctttctccagggccggtaatatccttcacacatgcatgaagtgtcactcttaccatggttatgtaatagtttacacccaaggacagatatgtatggcttttttaaaaagcaagtcatgtttgtttatgctccctagatagtactccatataaaattaaatgcatcaaataaatattccatctagtcatataaaatacaaagagagaacttaagactgaacactacaatgctaaatgaaatgtactttcagaaactacagattaaactagcttaaaaagtcaatcttacatctcacataagaaggaatttaatgaaggcatttcaaaaaggatctcaagttgatatgaatgcaaagtttaactcatttacctttgttttctaaatacaccgtacacactgcaacatcttattactcatttaaaggtttaaaaaaagggtatcaaaacaaaaccaacacaaacaaacaagccagatctcaaaggtatctacagtattaaaactcttaggattttctgggttacatgatggcaattcccaaccaagagagacatagcaggcattgaaacaatggaaatgcccacatagcagaagggagtgaggggatccaaactacaagagcgacaaaatcaactgtggatccagagacgaaaaaatgttctgtagtgcaaaggtaatctggtgagaatgatgaaaaaaaaagaaccatttttagaaaaaaggaatattagaaatattgaagtaaatatcataagtcattctattacaaaggcattaactccttcctatcaatagaatgtaccagtttaaaaatttttagtaggaatatatcttttattttataacagaaatcaagggacaaagagaatttgatcatccatacttcctactcttattggttgtcaaaatgtagccacataaaactgttcattcattttcaacttaacaaaatttcatttttggctgggtgcagtggctcacacctgtaatcccagcacttagagaggccaaggagggcagactgcttgagtccagaagtttgagaccaccctgggcatagaaaccctgtctcggccaggcgcggtggctcacgcctgtaatcccagcactttgggaggccgaggcggatggatcacgaggtcaggagattgagaccatcctgcctaacacagtgaaaacctgtctctactaaaaatacaaaaacttagccaggtgtggtggtgggcacctgcagtcccagctactcaggaggctgacacaggagaatggcgtgaacacgggaggtggagcttgcagtgagcagagatcatgccactgcactccagcctgggcaacagagtgagactccatttcaaaaaaaaaaaaaaaaaaagaaacacttgatcacttggcagaaactctacaagccagaagagagtgggggccaatattcaacattcttaaagaaaagaattttcaacccacaatttcatatccagccaaactaagcttcataagtgaaggagaaataaaatactttacagacaagcaaatgctgagagattctgtcagcaccaggcctgccctaaaagagctcccgaaggaagcactaaacatggaaaggaacaactggtaccagccactgcaaaaacatgccaaattgtaaagaccatcaaagctaggaagaaactgcatcaactaacgagcaaaataaccagctaacatcataatgacaggatcaaattcacacataacaataataaccttaaatgtaaatgggctaaatgctccaattaaaaggcacagactggcaaactggatgaagagtcaagacccatcagtgtgctgtattcaggaaacacatctcacgtgcagagacacatataggctcaaaataaagggatggaggaagatctactaagcaaatggaaaacaaaaaaaggcaggggttgcaatcctagtctcggataaaacagactttaaaccaacaaagatcaaaagagacaaagaaggccattacataatggtaaagggatcaattcaacaagaagaactaactatcctaaatatacatgcacccaatacaggagcacccagactcataaagcaagtccttagtgacctacaaagagacttacactcccacacaataatgggagactttaacaccccactgtcaacattagacagatcaacaagacagaaagttaacaaggatatccaggaattgaactcagctctgcaccaagcagacctaatagacatctacagaactctccaccccaaatcaacagaatatacattcctttcggcaccacaccacacctattccaaaactgaccacatagttggcagtaaagcactcctcagcaaatgtaaaagaacagaaattataacagtctctcagaccacagtgcaatcaaactagaactcaggattaagaaactcactcaaaactgctcaactacatggaaactgaacaacctgctcctgaatgactactgggtacataatgaaatgaaggcagaaataaagatgtcctttgaaaccaatgagaacaaagacacaacataccagaatctctgggacacattcaaagcagtgtgtagagggaaatttatagcactaaatacccacaagagaaagcaggaaagatctaaaattgacaccctaacatcacaattaaaagaactagagaagcaagagcaaacacattcaaaagctagcagaaggcaagaaataactaagatcagagcagaactgaaggaaatagagacacaaaaaacccttcaaaaaaatcaatgaatccaggagctggttttttgaaaagatcaacaaaattgatagaccgctagcaagactaataaagaagaaaagagagaagaatcaaatagatgcaataaaaaatgataaaggggatatcaccaccgatcccacagaaatacaaactaccatcagagaatactgtaaacacctctacgcaaataaactacaaaatccagaagaaatggataaattcctcgacacatacactctcccaagactaaaccaggaagaagttgaatgtctgaatagaccaataacaggctctgaaattgaggcaataattagtagcttaccaatcaaaaaaagtccaggaccagatggattcacagccgaattctaccagaggtacaaggaggaactggtaccattccttctgaaattattccaatcaatagaaaaacaaggaatcctccctaactcattttatgaggccagcatcatcctgataccaaagccgggcagagacacaacaaaaaaagagaattttagaccaatatccttgatgaacagtgatgcaaaaattctcaataaaatactggcaaaccaaatccagcaacacatcaaaaagcttatccaccatgatcaagtgggcttcatccctgggatgcaaggctggttcaacatacgaaaatcaataaacgtaatccagcatataaacagaaccaaagacaaaaaccacatgattatctcaatagatgcagaaaaggcctttgacaaaattcaacaacccttcatgctaaaaactctcaataaattaggtattgatgggacatatctcaaaataataagagctatctatgacaaacccacagccaatatcatactgaatgggcaaaaactggaagcattccctttgaaaactggcacaagacagggatgccctctctcaccactcatattcaacatagtgttggaagttctggccagggcaatcaggcaggagaaggaaataaagggcattcaattaggaaaagaggaagtcaaattgtccctgtttgcagatgacatgattgtatatctagaaaaccccatcgtctcagcccaaaatctccttaagctgataagcaacttcagcaaagtctcaggatacaaaatcaaggtgcaaaaatcacaagcattcttatacaccaataacagacaaacagagagccaaatcatgagtgaactcccattcacaattgcttcaaagagaataaaatacctaggaatccaacttacaagggatgtgaaggacctcttcaaggagaactacaaaccactgctcaaggaaataaaaaaggatacaaacaaatggaagaacattccatgctcatggatagcaagaatcaatattgtgaaaatggacacactgcccacggtaatttatagattcaatgccatccccatcaagctaccaatgactttcttcacagaattggaaaaaactactttaaagctcatatggaaccaaaaaagagcccgcatcgccaagtcaatcctaagccaaaagaacaaagctggaggcatcacgctacctgacttcaaactatactacaaggatacagtaaccaaaacagcatggtactggtaccaaaacagatatagaccaatggaacagaacagagccctcagaaaaaatgccacatatctacaactatctgatctttgacaaacctgacaaaaacaagaaatggggaaaggattccctatttaataaagggtgctgggaaaactggctagccatatgtacaaagctgaaactggatcccttccttacaccttatacaaaaattgattcaagatggattaaagacttacatgttagacctaaaaccataaaaaccctagaagaaaacctaggcattaccattcaggacataggcatgggcaaggacttcatgtctaaaacaccaaaagcaatggcaacaaaagtcaaaactgacaaatgggatctaattaaactaaagagcttctgcacagcaaaagaaactaccatcagagtgaacaggcaacctacagaatgggagaaaatttttgcaacctgctcatctgacaaagggctaatatccagaatctacaatgaactcaaacacatttacaagaaaaagcaaacaaccccatcaaaaagtgggcaaaggatatgaacagacacttctcaaaagaagacatttatgcagccaaaaaacacatgaaaaaatgctcatcatcactggccatcagagaaatgcaaatcaaaaccacaaagagataccatctcacaccagttagaatggcgatcattaaaaagtcaggaaacaacaggtgctggagaggatgtggagaaataggaacacttttacactgttggtgggactataaaccagttcaaccattgtggaagtcagtgtggcgattcctcagggatctagaacttgaaataccatttgacccagcaatcccattactgggtatatacccaaaggattataaatcatgctgctataaagacacatgcacacgtatggttattgcagcactattcacaatagcaaagacttggaaccaacccaaatgtccaacaatggtagactggattaagaaaatgtggcacatatacaccatggaatactatgcagccataaaaaaggatgagttcatgtcctttgtaaggacatggatgaagctggaaaccatcattctcagcaaactatcgcaaggacaaaaaaccaaacaccgcatattctcactcataggtgggaattgaacaatgagaacacatggacacaggaaggggaacaccacacaccggggactgttgtggggtggggggaggggggagggatagcattaggagatatacctaatgttaaatgacgagttaatgggtgcagcacaccaacatggcacatgtatacatatgtaactaacctgcacgttgtgcacatgtaccctagaatttaacgtataataattaaaaaaaagaaaccctgtctctatttttttaaatacatttttaaaaaataaaatttatttatttaaaaaaatttttttaaagtatcatttttatacatataaatacaatttttgaaaattttaacaagaatataatacattcaatctataataatttgtcatatctctaccaacatcttaaaattttgtttatttgtttgttgagacagagtttcactattgttgcccaggctggagtgcaatggcacgatctcagctcactgcaaccttcgccctccaggttcaagcgattctcctgcctcagcctcctgactaactgggattacaggcacccgccaccacgcctggctaattttttgtatttttagtagagacagggttttaccatgtacgccagactggtcttgaacttctgacctcaagtgatccgcccgccttggcctcccaaagtgttaaaattgcaggcatgagccactgtgcctggccagaattttttattataagcagtcaaaataatgagtctttgaaattattttttctgattacagaatcactttgtgctcactacaggaaacttgtaaaatataaaaagcagaaaagaatgtcccataatcttaccaacaagaaacaaccattgtaaccattttatttcttgtatgggtaccatcttacagtcagtaagaatactattaattaatacttattaaccacttcctttgagatattcagctaagagttttccaaacattttcattttacctttatattcaagtagtaggtgaacattttacagttgtgtcaagtagggtttaaagaggttaggaaacgtgcctaaggtcacagagaaaagtggtagagctgaagccagcatccttgatcactataccacaccactgtcaatgtacagatacagacaatgccatacactactccttgcttctaaaattataaatataatttttagatggctatttaataacagcacttggatatatagtaactttactgactcactcctctcctggatcagattattttcatattttattcaggatagtgtgattcattcaatacaaaaaataaaaactagataaatgcaagacttgcttgtccacttctaaatttaaattaaaatatataattcaacttactcttttactgaggcaaataactggccacatactgcaacctaatgtgcagcagcaacaaaggcagccacaaagtagccaacgtacattaacaggaaggttcttcttaagacaactgttaactctgttgatgctggctttaaattcttcaggagctacctaaagaaaaattttaagaaataataacaatgcaatattaatgtcaaaaaacatgactgatgagcatacttttttctaattttctcagaaaaaaactttcattttgaggcatacaaatagtacataaatgagacactcacttttccagttaatgaagaagggaattcagattcaaatttgttgctcagtccaaatctattttaaaaaataagaagaatatgttattacatgttattgttgccaaaaatgtagaccatttaatttaaaggtcaagtcaatagaaagcattttcacatatggaggaagttttagacataaaatggaagtttgagataaaataactgtaacaagcaatttatgaaatgtaacaattattttagcagttaaatggaaacttttgcataatgataaggggctgaatgttaattaaccagcagtatgtaaacaaaaatataaatggttcatttaatttgagctaccaactttatatcttaaaaagtaactacaaagcatattattttaatgggtgggatagcgattttttccagcttttaatgttattggtggaaacaaacaatacctgtgaattttagcaggtgtcctacacaagcaataagatgagaaggaaaaatgcaggaaaaagagtgaggaggggaagaataaggaaaaagggagagaaaaaataaaaaagtaggaatggacaaagtgctaccaagaaccgtcttaggttccattgaacacctatttgtcagtgcattagatggtatgaaagaaaatgtagacgtgtactatacctatatctattcctattacctaaaagaccttttcttgaatcatggttaaaatattccatggctttagaattgataaaagatttaaactattttcaaagaatggtaaatataacaagaagataaaagacataataaaaacaacctatcttgcttttatctatcagaagtctaccagtacttggagaacagagaattcattcaaatcacaactactgagcacattccatgcaacacttcagtgcaggcttttatggcttttacagcttcctttgtttccttaagaaatcacacacgagaccaattttacttttatataatttgagataattttgaaagttcatgtaatacactgtaaagttttgaaggggggactccaactttacacctaaatctaaatggaatcttgaaacaggcttgttttactcatatcccacatacatccatttcactatctctacattcctccagtctatagtcataactctgcaaaccactccaatctgttatcctgctttctcatgatcatcatattcaagtttatctttcctgatagaccttgaaaccctcaatctgttgatctgcagctatcaggatacctccttatatcttatcttaaaaaacaaaacaaaccttaaatacatacagtcatgtgccacataacaacgtttcagtcaggacatactagaaggtggtcccacaagattttaatactgtatttttactgtaccttttctatgtttagatacacaaaaacttaccactgtgttataactgcctacaatacacagtacagtaacatactgtacaggtttgtagcctaagggctatgggctataccatatagcctagatgtgtagtaggctacaccattttaagtttgtatacacacactctgtgatgtctgcacaatgatgaaattgcctactgacccatttatcagagtagtccccatagttaagcaccacatacttgtatatatcttcactttaaccaaaaaccctgttgaaatgccactctttccttagaaatcctcaactacagttcactcctgaccttatctattctaaagaactttacctcctgcacctccatctaattcagcaacctactcactgtgatatattctgcatattgtcatcacttgggactgtatcacctctgaaattctgaactgtaaaattcttctcttaccactgccatcaatcatttcatttctcccatccttactaaatttgttttttggcctctggttgtaatatattgcttcccacccctccatagctccctatgactccatttccttccttatttgccagaactacatagtcaatcattttgaacatactccaacaaacacctttaatcatctctacagtgtcccttgccaacccaggttcaattaaattgtttaccttcttcacactgcctggagctactggagaaaaatcacatttataaatgtatcaccaataataaatatatatataacatacatatcttatttctaatctcatgagtattattgtaacaatctttattcatccccagtaagttctcttttccatgctccgtagttgttgtgcctgtctttaggtactccactttatcctcacaaccaacatttttttgcaaataaccacagttgtcaactctgagagaaaaaaatgtcatggaatataaactgctttaccttccctcccttttatttttggatttacttatatatcttcagtatttttaccatctctcaatggaggaaagcttccaaaaactaaccatttacttctgagtgcatctcctccagtctcctctgcaattcactgtatttctacctcgcttcaggctccttaaacatagcctacaaacctgaattagtctatccacctgaggatgtgaatccttatttcttcttctctctcaatgtctgatggcatctatttctttccttcctcaactaatgttttgaaagactcctttacattaactatctttacgttacctcccattcattattcaaactaccacaatccaggctttcctacacacttctttactaataagactgttctcatcagagtagttgaaaacaactcttttcagcaagtcttctttcatatagcatgctttctcctggcaaagagcttgaatgtcagaatttcttatttggcacaggccacagcaaatatctcctttgctatgtttttcatccctgccaaaacctttttttttaatccaaatctagaccaaccaaaacaatagtagcaggtagaattttagcaagacggtcttattttattaaatggataggaaaagtcacacttcttgtttgataatataactgtaaaatatcacctctaatgatttatttttgacataaaccacttaattttgacaataccttagttctggcttcttttttaagttcagcaggaggcagagactgttagaatgaaaatggcatctatgttttgttttcaattgacagcattataaatgtacctacaagtttacataaaactttttatatatggtaaaaataatttcctttattctaagacaaagtacaactggttcagcacagtattagaaaggccaagtttcatcccataaaataataatttgatgtacttgaaagaagagcaatgattcctgcattgagtaggaagctgaacccccttcagactctaataaccaaacattctactaatccaaaaagccagaagtaacacttggataatttttaaaaatatgatttaaagtaggtggcatcttaattcagttatctacaagactaattaaattttaaaaaatattttatgttggcaagaaggtcaagatggaaaaatatcacacactgtcaatggaactataaattgttacaaccatttcagattaatttggcattgaaaatatttatacctttgtcatactgttttctctttagaaatgtaatattacctaaaaaataacttgaaatgtggattaaatttatgcataaacaagttcattgaatctttattcacaaatataaatatgtatctatttacaacattttaggaatggttaagaaaattatcttatctcaatataacagaatattaaacaaccattaaaaatgaaatttgcaaactaaaaacacagaaataccattgaacataaacttatttaccttccctccctttcatttttagatttatttatgtatcttcagtatttttaccatctttctcaatggaggaaaatgttgaagaagaaaattcaatataccatgatattaactgaaaagaacaaaaatcttgcaagttgatagaattttcaggagtgccatctggtagtatgtaaaacgggtcttaaaaaatattcctaccctggctgggtgtggtggctcacacctgtgatcccagcactttgggaggccaaggcaggtggatcacctgaggtcaggagttcgagaccaacctggccaacatggtgaaaccccatcactactaaaaatgcaaaaatagctggatgtggtggtgggcacctgtaatctcagctactcaggaggctgaggtaggagaattgctggaacccggaggcggaggttgcagtgagccaagattgcgtcactgcactccagcccgggctgacaacagtgagactcagtctcaaaaaaaaaaaaaaaaaaaaaaaattcctaccctttgacccagtaattctacttccagaaatgtatcaagagaaaatagctgcagtggcacagatatgttaatgaataatcaagtattctgcagtgttattttagggagggggtattaaagacattttgtgtcatttgtttttttttaaataagagctatttttcagaaatgtatagttcctgctaactaaataattgacgagtattttattttatttttttgagacagagtctcgctttgttgttcaggctggagtgcggtggcgtggtctcatctcactgtaacctctgcctcccgggttcaagcgattctcgtgcctcagcttcccaagtacctgggattacaggtgctcgccaccatgctgggctaatttttgtatttttagtagagacggggtttcaccatgttggccaggctggtcacaaacacctgacaagtgatccgcccaccttggcctcccaaagtattgggattacaggcgtgagccactacacccggcagacaaatattttataatgtacaataccaccctaattttgttttcttatttgaatattttatttggtattaactaggtattttaagataagtaaacaaggaaatttaggttcactaatcaatagttttcttgaatgcatttcaatgttttccatagttcaagtccatctaatcctctgtccttcttacttcagttttaacttcttctatgttccttgtatctcctcatattaacaatgtctcttggcattcactactgagctatcattttaaattaagacatgttttgaactcataacgaattttgctttttaaatgcagaaatgcaagaatccactgcttcaacttgttttgcccttaatcaaaaatatatgttcaatgtttcttttcttctgagttacagtgatatttttaacagtgaaatttttaaaacagaaatatcttataattaaattaattataatacaacaatctgaaaagatgctacacagctcaaaaccatgtatactagagagagtagtctgttactccgcatgcctaactaggaactccctatactttggctaattagatcacaagtgggcatctgctttaagaacagctaatccctgggctgggtagcagcacatggaatggcaaggccaaacagtcctgcctaacttagataacattaactaactcaatcagctctctcttgaggtatctgaacataagacaaatagatggtaacatgcagagctgacagagagagggcttaaattgaagtcaagatgtagtaaagccatcgataattagaaatcaaaataaactgaagccaatagtaagcagaaactgagatcaccagacaagtaatgatgggccagatcagggagggtctggtagaacattaaaaggactctgaaggagatggggaacctttgaggggcctgatacagagaaaagacttgaactgacttatgttttaaaaggatcactatagcagatgtaccaaaatggttgtataagaggagaggcaaaggtggaaaggtggagacagggggaagaaaaaaatatatatatattttttgtaatttagatggattcttgctatgttgcccagtgtagtctcaaactcctgggctcaagtgatctttctgcctcagcctcccgtgtagctgggattataggtacatgccaccataactgacttaagaaatacattaagcgtaaggcagaagggagactggcaattcactccagtcgtgtaggtggcaaaatagggccaaattttgaagacagagccaagatgtcaagacagaatggatgtagtgaaagagaaagaggaaaatcaagaatacatcaaaaagtttttgatctaaacaaacagggtcctcgatctgccatcaactgagaatggaaggctgccgttgaagctgatttggggtgtagattatgaattccattttggatattctggattctgagacattccacctgtacaaatctatagatacagagaatttttatgttcctacagatatgacaagacctatgagcatatgaactagaaatttcaaactgaacatattggttatgcagatggcacatgaagagagtgcttatttcctaatgttgaactttgagctcaatgaactcaaatttttagctagttttggagataaagtcataactatggaaaaaaattaacaggctttgatgcatataaatcatgctttaagtttatctggttgattcaacatacgtctgaatatcaatgtagctcaaggaggatgggatctaattgaaagtatactctatttatacaaaagatacagagaccctggagttggagacgtatatttgggtttcagaataattctaaaaatcttaactctgtaaccacattctgaacaatatttgagttcatctggttttatgaaagtttaatctcattcaggaaactagtgaaatcaaagacttaattctccaaagcatgtgttaaatttactctatcataaacctcaccattatacatagtcttataataatctagcattagcattttatcaatttttaattattaaggttataatttccattattaacagattaaatatgttgttaagcagtgaaagctatataagtgtatactgatgaaaatgcacagtataactaacttctggcgatatagggatgcagctgatctaacttaacaacttttaaattttctgaactacagaaaaaagatttttgtatatctgatttatacatattttagaatattcttcatacttctataaatcttaagagcaaaataatgatgctaaattatgttcatttaagcaaaatatatggttgaattgatttacaatatagactaacaaaaatactcatttcaagtaacatttataattgagcagtttagaaaagaccaagaaaggagactgggtacataggaactccaccactgaactaaccaaggcccacattatgactacaatgcaagatcaaagagaataaaacaagaagttcttgcaggaagctcactatatatagtacattcactttttttatcaatcaaaataacaaagttaggttaccttcaagtccaaccaactctatcctaagtagatagtgggagagaaaaaaagcttaagaacaaaaaaattattcttcagggacactgtgagaacatttcagctcctacggatgcaactgagttttaaatgtaagatataaaaaacacaatttttttcctcaaatctaatgaatcatgtactgagggctgtcacatactacacaccttacagctaaaggatatcacatttacgagggttcccacttcaaaatctatgatcttgtgggaaacactctctacttctggcatgtgctattctcttggcatactagctgccccagcagcagaacagaaagtgcaggtatgccatcaaaatcactcccagtgaacagtaagggtagccagttatttaacctcagcctacacaaagctaaaattaaaaaataaacagaccaaaacaaacataagaactgaggaattagacagcaaaagtggccactgctatgtatttccatacctcataggaaaagctgtgaaatttgatggtttacacacagaactgtaataactcctttaatctagagatcaacaccctagctggggccactatcatgtcttatggaagctgcttctataaccttctaaatttcattctaattcctttacaatcctttctggcccctactgaaccctccaacctcatttcaagacattatcccctttgttcactatattctagccataatatagaggtatcctttcagttcctcaggcaagtcaagcttgttttggcttggagtcttggcacctgctgttctccagatccaggggctcctgacaggactctcatccttcctaaatgttagcttcctcagagaggttcttcctaatcacattattttcaatcacaggatctcatccatttccttcagtgcaactttatcagataaaatttgtctattagctgtaaactccatgagggcagaaactatgtgtgtttcattttgggtttcattatatacccagagctttgtgcaatacctggcagaaaaatgggcatttaacaaatactcattaaattacttatcaggaaacctcaacaagacagctgataatcaaagattaagcaaaaaatactctgagaaaacaaaataaatattgtaaaacccaagcatcaaaacccaagcatctacattcaacaatcaggatgaacttctcttactttatatgcagttctaataaggctggttggttgttttgcttccaagaacagctgaccaattacaaagacagaagaaagcaaaccaaaaagaacagcccacatatgaaatttaaatgaaagtgccatttagagaaggttctcaaactccaacatacctcagggccactaaggcatcactgtgtatcaatctgatagccgcttttgattaaatgattcctctagtcaattagataattctgagctatgctcagaatcttgttttaaagcagaaaagcatacttcacattttagactgacttcccacaaaatggtaaagaataaccaaaaaaatgtgcatgcagggttaaacatcaaaatatgtcataagtaataatttattgaatgcctattaattagataaattctgactctcacacgtaacctctaaggtggatattatctctttcgcagatgaaaaaactgaagttcggaaaggttaatctgcttatggttactgtcaggaagtgactgagaattgaaaccaatctgcctcatatcaaagaccacactttttccacagtaccatctattactttccaaatatgtctgatagaatcacataacactcctaccaaaaataaaaatccctagactcttcccttccagacccaatattctgattgggtcaaaagtcacatacacacatacacacacatacacacacacacacacacacacacacacacacacacaatcttacacagaagatacctgaaggatacttaagagcatctgttgctacatgttatatttaaagcttaattttattaataaaatctaaatagctttatagcagattagaaacctaagccagacacagctattagagatttgaaagatttctttctgagtatacagctggcctaatatcctgggcctttaacctgttgacagtataaactccagctggaattctgctttagagtaatattatttatttaaattatttagaatagtatttgattagtatcataataattacatataatttacttttcaccatttaatccctcttttccacttagctagtcatataaaattttaagtactaatcaatttcatatcccttggtaggcaaaaatccaacactgaactctttggaccaaatgtcatataaattctcaaattcaaatacagtaaaaactttgaaacctcagttaattatcatatttctcatttcttcaagaaaatctgtgcattaagaagttttagtagttggtccaaataaaatgcatagaattttttcttcacattaccaaagatatgtattatatcaaattaccaaattataatcaaattaatttcctctcaaactatatggaataagaaaaatctctgggaagccacgcatggtggtttatacatacaatcccagcatttgtgggggctgaggcaggaggaacacttgaagccaggagttcaaaaccagcctggcaatacagtgaagccccatctctacaaaaaccaaaaaactaatttttttaaaaaattagctaggcatagcagcgtgtacctgtagttctagctacttcagagactgagaaaggaggatcactagagccaggaggtcaaggccacagtaggctgtgatcaggcccctgcccaccagcttaggtgacagggaaagattctgtctctaaaaaaagaaaacaaaaatctctggagaaaaaaaaaaaagttataaaaaaaaaatctaccttaatttgataatttcctcacaattaccagatttcattttttaaaacagaggagctatttatcttttcagtgtgataagtattctattatagaacattgtttgcctttgttcggaggtgcagagaagaaaacagtgattcatttggcaattctgacaaaatccaaagatgtatacaattacttcattcatttagaaaatattataggaactataatattctggacactatattaaatagtaaagaaagatcaatagacacaacctctgccctcaagaacttatagcctgtggagatacatcaatgaagccttcaaaaatttcaaaacagaaagcttaatctttagaaataaatagaatgtgtcttaaatattatgctgggtgggagaaagaagtaggaattataaagtttaacaaaattgttttattgacatgattctgtaatttggcaactcacattcaggtctcttactgctaaccacagcatctagcagcagtcctgaaatactgacacatttcaagacaattttttactaactctaccatttgaaagatcaataaacactaaggtgttcttgtgatgtctcttattcaaaagtcatattccatcccagtgtagttcccaaacattttcaagtcacatttctaaatctttaatcttccataacatatctggaatgaaaacaagcaaaaagtggtttccgacagccattgataaaaactggtgttgaaggataaggaattatttgtggagatggtaagattacacctcagaagagagtacatgaagacacggtaaaattacaagagaataacattagaaacaaacctcagcaaaataacttggctctatgatagggcttgagttagaagtcaaagattatacatactctaggaaagccccaagtttgattctgatacaagaagggtagaaagtggagatgggagcaaataatgtctgttataatgacagattacctaggaaatattggcctaaaactacttttaaattctaacttttagactgacacatcctttagagttaccactgtgaaaaacgaaactcttcaataaatgatcaacatattttgcaaatatattttgaagcataaggaactccataattttaaaatattaaccaatctggtcaagactacctaatagtctttttacagtattactgtttattttagaaactatttttcctcatcgtcaattatatgagaagtcaccatgaaagcaaaaaggaaatctacttttaattgaatggtgactgtaagccttttaggttacatgtacctaaatactatgcaataacaggaatttatcatttattttccttccttccaataccactttcctcaaaatatgcttctgcacaagatttccccatattgctacctagaaatctaacaatgaagggaaatattatacttaaacagaagaatgtcagaaaagaatactgatcatgagagaagtataaaaagtaagtctgatttgggggtcacgatgaaaacatttgtatttaaaaaaaggaaaatatttgcattaaaagccactttaaagcagactttaggcaaattaaacatgttgcatcctatgtcacaaaaatctgattatgcctagagactaacctagagaatggaaggtaactttctttctcacatcaccacaatgacatgccaatcacgtcacgtgagaataccagtttctaaaataaacagtaatactgtaatatattaaagtagaaaaaaagagcagaaatagtcaattgtaaagggctactcaaaagttacatctgtgaaaaacatatggattgatctatatccttctagactgatctagactacagatgattcagtttacatggtcaattactttcaaattggtaagggaagactgctctgatcagcacctaataaaaaaaaaaggtggaggagggggtgttaaatttagccagtcttactacaactgttctaatagctcttcccatttatatttaaagcaagaaaaattgaatgtgctcaacagttatagtaatacatatgcaccaattctaaaaacctttatagatgttaactgggctacccactggcatggtgtgctagtgtgcctgggaattatgcatgacagagccatgttaaaaaaaaaagttttctattattacctatgtcgccacaaaacaggttaagttttcaatgcagaaagatccttattgtcatcaaaatacttcaaacacagtaatttaagcacatacacattgcttagaaatggaaaaataagactaaggtgaatcattgttatgtttgataatggcagttctaattttttagtactttgttttacacctgtttctcaaagtggaaaactatatctgaggaggagaataataaaaactagtatctattgaacatagtaccacacagtgcaataaattcttttcatgtactatctcatttaatccttaataatcttaaaaggtatcgactataactatccccatctcaactaaaggtcatgaataaacaatttatccaggaagtagctgagatagattttaacccagagcctagaaccaagataaatgggagaagaaggaagttgctgaggaaaatcagagatttaactcacaatgtagaaaggcatactgtttattgatgatagatagtccctccctataacctggaatagttttcaatcttggctacacattagaatcacctgtgagattttatttatttatttatttatttatttattattttaactgtccactcctaggaccctcacttagtatttggccttcaactggcctggggtggagcaaagacaatggtctttttttaaagacacccaggattctaatggacagctaagtttgaaaaccactaataattattttctaccctattaacctctccacgtagccaactacaatcaagtttactgattacctaggttctgagcactttgcccactattgcattttccacttgcccaacaaagtgcttagcttttcttctccttaacagaggaaacattacaactacagcgtcgcctttttaaatgacaaaattctctagcttttctttgacatgaggaatgtagaaggagggatagatggcatgacaaagtttggaaatcacttctttaagcatccacatactccttaggcttaaaacagtgcaaaaaggtcctaaaagtcaaaataaaatcaaatggcaggttatgaattctgtgatatatgttaaaagtttaatatccatgatatttggttatacttcttaagctggtgacaacacttagaaagtattattgtggtgaattaaattccactgtcttgtcatggtgctgtgatggcaattatgcagtgtttttaccctgttaagtcacctgaacataaactaacaggtactaaagaaattaaagcattacataagcatactcaaacaacaatatggctggtcatacgagaaatgcaattattttgctgacaaacttatatgagaagtcttactgtttccctaagttattcacagcacatcccactcactcttcaccaaaatataatgaagactattccagacattctcagacttgctggctcttttgtttcactgaaaaggtgaagaagtacagagatacctgacaagtatggaagtctgatctattatttgaacaagagatctaaaatgagagagtatcaatgtaatacatcaagtggtacaaaactgtggacttcatagtgaaacattacaaaacttcctgcttccggacagctcattatttggttcaaggcttcacattcctttgtcatggtctttccgaaagctttcattccttattaatatcagacttttaatgttactagtgggactttccaaattaacaagccccaagttcgtgccccaaggaggagcttcaggactacaattttccctcagtaacctgagcagagtgtatgtccctcacgtagttgttgttgttgttgttgtaaacatatttctttctgtatatcttaaatttgtgttcaactatatatttttatcacgtacaattacaagaacttgcattagttctgcggaaattagtggaaaaactgggagacctgtgggtatgtgtgaaatagacacgaaacggagcttcgctgccaattgtcactggggtctcacacggcccagatctggcctctgagccatgtcactgggtgcaaaggcacagacaaccacagggtaactgggcgagaaaacaaggaggctccctgtcaatacacgtacttccaccctgaagaggaagggtggcccgcagggcagaccctaatgaaaacccgtgcctactgggatcgtcacatcgcccgggcctgtagggcctgctaaaggggtgtgtggaggaggaaggacagcgtccgtccccacttcggagacccaaacaaatgaaaataagccaagttctcacttcctggttgcctactctttcggaaggcccccgacaccagacggacacaggggaaacggggctcccgtggagtaacggggcccaccccagcccgcacctcccgccctcgccctcctccgggccttacacggtgacgtgaccggagccgcggacgaccaccgggtccggcgagtacttgagcagctgctcctccagggcccgctcctcgtcctcctcttcctcatagatttcgtcgaaatccgccatcctgagcctccgagctcccctgcccaaagggcctgactcccggggttggcgccggggtaccggcgggcgaggcggcggaggctgaggggagtcgccgctgccgccggctccgaggccgcggagttcgctgtcggctgtctcggctccggctacagaggggatggggtctggaccgtcgccgccaccgccgccgccattaccatcagcaataacaacaacacaatgtcaacatccgcccagaggccgacacctccacaagcacagacgccgctgccgccgccgcagcagcagcaactcaggaaaccacagcaacagcccgagccacccgcagcgggagcagccggctacggcatcgcgagacttcccgggccaacgggcgggcgggcgcgtgcgtgggcgcgtgggcgagcggactggctggcgggcgggcgggcgcgcgcacgtgcggcctcgcgcgctcccaggccaccgtctttcctctgcttctacccgcagacggcgaccggggcgcgcgctcccgccggcgggcccccctccgccgacttctgggtggcggaccctgggggcggcggctccgctgactggaggccgcgacccgcgactccgacaacgcagcttggaatgtccagtgggacatgcagttccccaaagtcatctctaaccaaaacaaacaactgaaaagaaaagccctggctggaatagacacatttttgtgcgtgtcattgccagtttatctaataatcgcatctcgcttttcctcaggttttgagtctatgatgagaaccagagtctcttttttcccaatttgaggagtccagcagagacactgcaaacatttgtgctcaccacaggatttttcaagacatctccaaattcaaacatcttatcccttgatccccttaagtataatccaatatatgaggccagcgatgctggtatttttttttttttcttacaagaaatctcaccgtagtcatgctatgaaaaaaaactgataaattacctggattccatattagaagatgcagtttcttgccccaactctctcaccaaacataacctggtttttgttgttgtttccttaaaatcttagggaattcctttccttttcttaccagttcctaccacaaaaaagacctgaaagaaagggcagaggagaggaagaaaaggaggcaggaaggaagaaaggatagaaggaaggacgagaagaatgaaagaagaatgggagagaaagaaagaaggggaggaaggaaggaaaaggtttaatggagtctacttagctgcctagtaacagttgaacggtcactttgggtacttggtttcattaagcatataaacagcacaggggaaggagtgggcttctgagaagagagtcctggacagtgaggatacaccatgggagaagaaaggatagttctactgagcccagcgctggtcaggctcttcaagtgcagtgttcatgtcacagtagtcggctttagatgggtcactgttgacgtggagaaagtgcaaaggaggtcaatgaggacagtgagagatgccaacctccttttggaaacaactgaaggaaatgagtgtggttagccaagaaaaaatgaaggaaaaatacagtagttgtatcagacttattgtatccctccctggagggtatttgttcattcaacaaatatctactgaactctagctatgtggcaggcactgtggacgtgtgtgaatgaggcacaggccctgacttctggtagcttatctattgttaaggcaagcaattgtcatctctgccaggggctcatggaggaggacacaggaagtgtcagtggggcacacaggaggcagcttggtctggtgtttaacaatgtgtgttctggaacctgactacctggccttgaatgtcagctctgccacttactgtgtgaccctagacaagccacttaacttccctgttcagtacctgccccattgggatgctcagcagattcaagggcttaagatcggtgaagtgcctagaagaaggcccagtacacaataaatacggggtaataggtgatgcttaaggctccctagcttatcaaccctgtgagggttaccacagcattatgtaatattttactgcttataaagcacgtacataatatatcatttaatattcccccaagaacctgtgaggtaagcaaagagggtgtatttattttcagatatgctatgtttcagagatgctatgatatgctatatttcagagatgctatgtggctttctcaaggccatgtgacgatttaagatttaatggtctaattgagtatactggtggtccaagctttcctgaatgtcttttttttttttttttttaagacagagtctcactctctcacctaggctggtgtgcagtggcaccatcatagctcactgcagccttgaactcctcagctcaagcgatcctccctcctcagcctctgaatttcctccttggcaggaaccaggagactagtggctgcactcagttaaaggaacagctgcaaatgggaagataagaaagagaataagaggaaataaggtcagtatgtcctggcacagcccacacctggctgtggctgagaattcacccttatgtagaaacagtggccaagataaggggctagtgccccaaagtatctaaatcatcacatagctgacaacttcccaaagacggaggaagccacacagagctccttagaactccagcaccttccacagttcctgcttcagaaaaggagcttaataaatgttatctgaattgagatacagtgttactagtgctctttccagaacactgtgacttaattaggcttcagaggactgtgagaacctcactcttatcttcacactggctggatgtgggagaaatgttcttattctaagatctattcaacagagagatctttgtaactcccacggcctgggtatacggtagaggcagggaattgccttttctttttcttttttcctttctgtgtgtgtgtgtctgtgtgtgtgtgtgtgtgtgtgtgtgttttcttctttttcctgttctgaaaaacctgtcagagccagcaaaagggtgtgggacctaggaagaaggccaaaggggtgagcgaacatgagtcaaacattttcctgatgagagttgacatcgtaattccaaccctccacctccgccctgccaaccttccaagatccagtttcctgtaaaactcctcccccaatttcttcctggagataagccacttttccaggatcctctccctctgtgtccaggtactcacttgcaccctgctaagtgcccatccctccatagcctcctcttcattggagtttctctttatattcttgcctcacatattttcatatttacctttagaccaaatggctcaaaaccaaactggataatgtcaggcctcaggagtcagcaagacttgtttttaaggcaaatattgcttagttaattccttagacttgaaaacttcccagttccatttctacctagcagagtggccattggcagcttcacctttctaagcttccttttcttcatcttcaaatggaaactatgtcatggggttctggaagatcaaatgagatcgtgcatgtactatggactgaattttgtccccccccccaaattcatatgttgaagccctaaccctcaatgtaatggtatttggaaatggagcctttggaggtaattaggttgagatgaggtcaagaggctggggccctcatgatggaatttgtgcccttacaagaagaaatactagatagttttcgatctctctgtgccatggggacacagcaagaagacagtcatctgcaagccaggaagagaactctcaccaggaaccaaatcatcaggaactgtgagctaaatttctgttgtttaagccacccaggctacgatgtactgaatgtttacatccccccaaatttgtatgttgatatcctagccctcaaggtgatggtattaggaaatattagggcctttgggaggtgattaggttatgaaggctgagccctcatgaatgggattagtgccctcataaaagaggccccagagagctggtttgccccttccactatcttagaacacagcaagaagacaaccatatacaaggacgaagcccctcaccagaaaccaaagctaccagccgtttgatcttgaacttccaagtttccaaagctatgagaaataaatgtttgtttataagtcacatagtttatgatatttgattatagcagcccaaagggactaagacacagtctatggtattttgtgtggcagcctatttgtgtggaaaatacactcaatgtgctttttcctattctcctgcttaacaacaacaaccaacacagaagactctctgtgaccagatgtgttggggggttttctccaccaacaagcaagcaatcagttctgcagtgggcaccagctgtatgtcctaattcaattccagcactctctacctggagatagcatcaaatcccacaggttgagggctcagtccgcaagactgcaccctccacttcaaacaccagtcacaagtccaggtctccagaacttctgactgaccagctataaattggggttcccacaacaccctcgtcaagttcaactaatttgttagagcggctcacagaactcggggaaacaggtttaccagtttattaagaaggatatttcatttcatttcatttcacttatttattgagacagaggtacaatcaccattcactgcagtccaatagttatttatttattatttatttattgagacagaggtacaatcaccattcactgcagcctcaacctccctgggctcaagcaatgctcccacttcagcttcccgagtagctgggaatgcaggcatgcaccaccacatccagctaatttttatattttttgtagagatggggtttcaccatgttgcccaggctagtctccaactcctgggctcaagtaatctacccaccttggtctccaaaaagtactgagattataggcatgagccaccacacccagccaagaaggatcttttaagggttacaaataaacagccagatgaagagacacagagggtgaggtctggaagggtcttgggtgcaggagcttctgtccccgcggagtcggggtgctctgctttcccagcacacggatgagttcttgttcatctccctgtaatcctccacgtgttcagctgtctggcagctctcagaaccctgttccttcagggttttatggggcttcattacgtaggcatgattgattacaccgctggccattgacttaatcttcagccccttctggtgatcagctctcatcctgaagctaactaggagctgccagcctacagtcaactcactagaatacagaaagacattgctttggagtttctaagcattttaggtgttgtatgccaggaaacagggtcaaaaaccaaatatgtatttcctgatatcacacagcccaagctgacttgagaaagcatataaaccctcatttgttcactcattcattcattcaacaaatttgcattgaatgcttctcatgtgtcacatactgtgccaggaactagggatttagcagtaaaccaaacacagcccctgcctttgtgagcatgaagtccactggggaggactgacagataattataaaaataaataactattagaattgtgatcagttctgtggagaagcacaggggtccatgggagtagtaaacccacctaactcactccaagaaatcaggatttattctctgggaaaatgacatgtaagctgatgagctaagcaaaggtatggaggtagggaagtagagagaagagaggagaaagctccagacagtgggaatagcatgtttaaagaccttgaagtagaaaagagcacagctcaaatgaggtaaaaaacaaagccagtgtgggtggatcatagtgaggaaggcagagccagattggagttgaggtcaaagaggctggtggaaacttgatggcctttgtaagaaatcttaaatgcatgccaaaagtaaaggagcggaggatgtgaagccaggcagtgacattatcagatgtgcatttttattatttatttatttatttatttatttatgtatttatgtatttatttatttatttattttgagacggagtttactcttgtcgcccaggctggagtgcaatggcacaatctcggctcactacaacctccacctcccggattcaagcgattctcctgcctcagcctcctgagtagttgggattacaggcatgcaccagcacgcctggctgatttttgtatttttagtagagacggggtttcaccgtgttggccaggctggtcttgaactcctgacctcaggtgatctgcccaactcggcctcccaaagtgctgaggttacaggagtgagccaccaggcctggccagatgtgtatttttaaatccccaagtgggagaccagtagtccagcctagcctgcctgcaccacttcccagcctgttattctgtaaatggcacacattctgtaacaacactctcaggatttttagtaaatcatatcccctccatcctcagtacatgtgattaggttaagctgaccatatctccagttccaagagtgggcatctgacctaaaatgttcaggttgtgccccaaccttagagtttttggtgcccgcagtataagtaatagaaaatagcacttctgctccaatgctttaggattgatgtatgtgcaatacaactatgcaaaaggcctttagagagcaacagagatcctcttcgccttccatacaactgtggccactaaaggagagggaaggaagatgatctaaactaggctgggagcttcctgagagcagaaccaattatgcttggagaaaaagctaaatgtgtatatagattaagcatccttaatctgaaaatccaaagcttgaaatgttccaatgagcttttcctttgagtgtcatgtcagcacttaaaaagtttcaggttttgaagcattttggattttggatttttagattagggatacacaacctgtataacacatatagtattccaagcactattctaagcactttgtacaaatcaacccacttagccttataagccttgtaaacattcctataacataggtaccgttttcatccctgttttagacattataaaactgaagtacaaggaagttaggtaacttggccaaggccacacaactaggaagtggtagagccagaacttgaactcaaataggatctttcctcatcccataatcttaccactatgctacactggtcttaaacaccactagagaaatatttgggttccttacatcagtcttcctaacacctacaacagtacctgccatataattagtgcttaataaatattaaatggggtcaagcacaatggctcacgcctgtaatcccagcactttgggaggccgaggcaggcagatcacgaggtcaggagttcgagaccagcctggccagcatggtgaaaccctgtctctactaaaaataaatactaaatggatggctacatgtataaaatcatattttccagatcatttcataccatgtgtacacatttggttcaaaatttgtccctaaaatgttgttataataaatctatgaaatccatgttgtttctcttagattctcctggagtaatatctaaatctaaataataataatacctataaagtatctaatttaggctgggtgcggtggctcacgtctgtaatcccagcactttgggaggccaaggcgggcgaatcacgaggtcaggagttctagaccatcctggccaacatggtgaaactccatctccactaaaaatacaaaaattatctgggtgtcatggcgcgtggtggtgagcacctatagtcccagctattcgggaggctgaggcaggagaatggcgtgaacctggaaggggagcttgcagtgagccgagattgcgccactgcactccagcctgggcgacagagcaagactccatctcaaaaaaaaaaaaaagtatcttttaaatcaacaccataaatataaaatacttagtttatgtacttagctctcttcactaccatcttttaagttcacgacaatctggagattactactagaatcataggttcataaaaccagaatgaacccaaaagtcatctggcccacactggccttcaaaaccatgtaccagtctgcatcacacggtacttccttctttagctgaacaactacaataattgtattaaatatctatagtatattgagcatatacaaaaatattatgttcttccacataaaagactagattctttaaggtctagaactatgacttagttattcttgtaatctaagcccttgactattgcctggaatccaagagtcattcaatacgtcttcatctgttagttctggttcttgtctctgaggacacacaaaacaagtctacttcttctatatgatggtccttcaaatatgttaagatgtgcgcgtctgggcgtggtggctcatgccggtaatcccagcactttgggaggccaaggcggatggatcacaaagtcaggagatcaagaccaccctggctaacacagtgaaaccccgtgtctactaaaactacaaaaaatcagccaggcatggtggcgggcgcctatagtcctacttgggaagctgagacaggagaatggcatgaacccaggaggccgagcttgcagtgagccgagatcgtgccactgcactccagcctgggtgacagagcgagactccgtctaaaaaaaaaaaaagatgttcacatcccaaatcttttttgtttgtgagctaaacatgcccatttacttcaaccatatttcctcctggaagggagtttctagtccctgcctctttgcagaggcagtctctcactcccatcagccttggtttggtcaacagccttcttaacatttggggctctgactagatggtgtgacttaactattgtgatagccagccttcaggatggtccctgagagactcatcaacttgtgtgcaagccattctatagttccctcccacactgaatagaggtgacctgtgtgaccaataggatttgtgaaagtgacagtatatgacttccaaagctaagttataaaagacatgacacattttatcttattcccttaaataactcattctggaggaagccactcaccatgtcatgaggacactcaaacagacctatggagagactcacatgaacaggaactgaggctttctgccactcatgggagtgagccaccctaaaattggatcctccagctccagccaagcagccccaactaacatcttgactgcaaccccagaccacccagccattcaccaattcctaacctccagaaactgtcagaaatgacaaatgtttattgttgttttaagctaccaagttttggggcaattggttatgtagcaatagatgactaatacagcaaggctagaagaaagagggacttagccctttcttcctgaccctggatatcataagaaacagtagaaagacaaagaaaaatagatcaaactattaatttttaaagtcgtaggttttagaccgggcgcagtggctcatgtctgtaatcccagcactttgggaggctgagatgggcagatcacaaggtcaagagatggagaccatcctggccaacttggtgaaaccctgtctctactaaaaaaaattcaaaaattagccgggcatggtggtgcacacctgtagtcccagttactcaggaggctgaggcaggagaatcgcttgaacccgggaggcggaggttgcagtgagcctagatggcaccactgcactccagtccgggtgacagtgagagattccatctcaaaaaaaaaaagtcataggtttttttctcttctgtgtctgtgtgtaaaatttaagggatatttttaattaagttgtgttatgtctctgttaagtgccatacttaacttagacacttaaaacatggcttttaagacactggttttcacttttaagatctgagaggcacaagcactttcttttggcccctgaatgcatgctgagaaaatctactctttatcctttggaactctcacttgaagtcaatggccttcttacacaccagtgttaagattttctgtagttctttgcacatggtacagggaaaagttggatttaatagttataatcatgttggccttctcacttaattgagattaggaagtacccagcttcatctgggaactcaaaagagaagttgtttctatgttctcccactgccatctccacctacaacacacaaacacacacacacacacacacacacacacacacactggccttactatggtgtttcttccctatttttaattttttcttatatttatgtgattttttttctgaatatgtctactttttgaattcatacttttcaaatttctttcttttctactttattggctagtatatctcaacctcttcttaacctgagtgactcttaggtagaactaaaatgtttttaaaaattctcagctgggcacagtgactcatgcctaaaatcccaacactttgtgaggccaaggcaagagaattgtttgagcccaggagttcaagaccagcctgggcaacatggtgagaccctgtctctacaaaaatacatttttaaattaaccaggtatggtggcatgcacctgtagtcccagctactcaggaggctgaggtgggaggatcacttgagccagggagatcaaggctgcagtgagctgtgattgtgccactgcactcacctgggcaacagagtgagacccagtctccaaaaatgaataaaaataaaataaaataaattctctcaagtcagttaactttaaggtgtcaatatccagggtataaccttgctctcagtgacattaagcacataaagagatacctgaatttgagctttgaggatcatctggtgactctgcacttgatatatttaaagatatcaatgtgtcctttgaagctataatggactatgaggtaatctgaaggtccagaaaactaaatacacgttagttactggacgaataacttagtcttggagaaacaaaatagttttaagtgaacgtcttcagaaatcttgctattatctttttatgctgtagttaatcacaccattggaggatatttggatatgaacatgtaaaggaatgcaatatctttattcagaaaaataaggggaaaaatcaggcaaagaaaaaagtagaaaaaatatttatttatttttattgttattttgagactgagtctcactctattacccaaactggaatgcagtggctccatctcagctcactgcaacctctgcctcctggtttcaagcaattctcgtgcctcagcctcctgagtagctgggattacaggcacctgccaccatggctggctaatttttgtatttttagtagagatgaggtttcaccattttggccaggctggccttgaactcctgacctcaaggcccgcctcggcctcccaaaatgctgggattacagatgtgagccactgtgccggccatatttatatcagtatttacatactgcttaatattttataaaacatgttcatttgcaatgtcacatctgaccctcaccataccccagtgctgtaaacagagagatattcatcccattctataaacttcagagaaaacttaagttaaatgacttactcaggctgggcatggtggctcacacctgtaatcctagcactttgggcagctgaggcaggaggtttgcttgagctcaggagttcaagaacagcctatgcaacatagcgagatcttgtctctactaaaaattcaaataaattaggtaggcgtggtaaggcacagctgtagtcccagttatttggggggctcaggcagaattgcttgagccaggaaagccaagactacagtgagccatgatcatgccactgtagtccagcctgggcaatagagtgaaaatctgtctcaaaaaaaaaattaattaattaattaaattaatttttaaaaatgacttactcagctcagatggcccctaaaagctgaaatacaactaaggtctaagacttctgctgtaggtaaatgtttctactgcaagggagaaaagataaataagaaggaaaaaatataagcaatgagaaaataaagctaactggttttactcagtataattagcaattgttgagtggttattttaaaagtctatatgcttccccaaagattttacaatcccatgatgatatttaagaaactgggcatttctccatcagccaggaaggacattggtgttgaggacaataactaccacggcttccagtgttttgaagaaatttcagatgcatagccttttggccaggtgtctgtgatttcatattgtcagagcatttcttgtaatgctgggggttgcagctctcttaaagtttacattgctgaaccaagaaagcagatatatgtagatttctacagaaactatgattccatgaaagattttgaggaggtgaagagggctggtacctttcagagtgcaaagtgattttggaatgttaagaatgttttgggattgagttcctcagaagtttgtcactgacctatgttcctgaactatgaaacatgaatatgtgggctaaggaatcatttgtactgataaataaacaattaaaaatttaaaaaaagaaactgaggaaactgggttaactcaacaattgtcatccttgttatcatctgtgtaatgcagctaattatagtactcattcataaagttgttgggaggattaaaatgatacaatatatgacaagtactcaacgttagttgttattgagggtgttgttattttaatcaggatggacaaaattctagataaagagtagaagatatgcgttttcatgctgttataatcagccaactataaattctcttccttcagttctttttttctagagaatgaagacaatattcctttctagttgcctccttcacagaaaaaattcaccagaatggattatgttctcagcaccgtcaaagccttgtagaaacacaagaagatcctgcaaccatttttctcttccagtctttctccttgccattctgagcagagccatattgcagtgcagtggaaagggtatatgaatggtcattcattcagacttacatggctgtctggcaatttaagagttcaatggctgaactggaaagaacagccagcatgattttattgttttctgagaatcaaatgaatagttcacactatctatgcacctatcatctaaggaacagacaggttattttgctgaggatgagcatagtcactagcctgtaagaggtttctccacaagaatatgcttcctcaaaatgtacttgcaaggctgttgaggctactactcaccttagacatgatcccactttggctcaaagatcccactctgccagtggttctgttaggtctctataacttcatttctatagcagccctcctgccacccggctgccaactgtgaggacctgttgttcaagggcgtatcacttgagcaggtgagcattcttattagtatcacagagcagctatcattcacaattacagcatgaatgttgactaaatcagagaccattcaaacccacctacaccctgtgacatcagcatgtggttctattctgccctgcctgattttagatgctttaggaatgatgtaacttggcaaagaaatcctaagtcaaaatttttttgatgataatctcagatcaactgagaatgatgccaatcaacccatgaatgtaatgtgtctcacatgtgggattctataattagtgcttactaatagaggtttcttcaagttactgaaatgagtttacaaactttaggtagctcaggaccctaccctcatgtatatgtgagatttcatttttataaatgccactgtcaaagggtcagatgttgctttttattctcgttgctaggatggtcaaaatcaacattttgatggttgtgttgaacagagcagtccagtcagatttaatccagtcatattaggatcatgccattagagaacagttccacaatcttttctaattcctcttttgtttctggatcataattaaaataatataggaacaaccttattaataaagcttgaattagtttgtctgtattgagctggcctttcatttttctgtcatacaaccttaaaagatctctcatgatttatttatttatttattgttttgagacagagtctgtctctgtccccagggctggagtgcagtgacacgatcttggcttactgcaacctccgcctcctgggttcaagcgattatctggcctcagcctcccaagtagctgggattacaggcatgcactaccacaccccgttaattttgtatttttagtagagatggggtttcgccatgttggccaggctggtctcaaactcctgacctcaagtgatctgcccaccttggcctcccaaagtgctgggattacataagtgagccaccgttcccggcctctcttatgatttgttaactattatctttatgttttcctacatgacattaaattatacaatctttgaaattttactatatactttcttttccatgttagtgttaaaacttccccttacagagccgggtgcggtggctcatggctgtaatcctagcaatttgggaggctgaggcaggcagatcacttgaggtcaggagttcgagaccagcctagccaacatggtgaaaccccgcctctactaaaaatataaaaattaggcaggcatggtggtgggtgcctgtaatcccagctactcaggaggctgaggcaggagaattgcttgaacctggaaggcagaggttgcagtgagctgagattgcgccactgcacactcgagcctaggtgacagagactccatttaaagcaaacaaagaaacaacaacaacaacaaaacttccccttccagaaaacttttatcctttcagacttaagctaaagtctgaaaccacaaaactcctagaacaaaaaataggggaaaatttccttgacgttgttattggcaatgattttttttggatgtgataccaaaagtacaggcaatagaaacaaaaataaagaagtagtacactgcatcaaatcaaaaagcttctgcacagcaaagaaaacaagcaacaaatgaaaagaaaacccacagaatagaagaaaatatttagaaaccacgtatcagagaaggggttagtatttaatatagaaaaagaagtcatacaactcaatagtgaaagacaaaaaacctgatttaaagataggcaaaggaccagaatagacattttttcaaagaagatgtaccaatgtccagcaggtatataaaaggtcctcagcattactaatcatcaggtaagtgcaaatcaaaaccacaatgggatatcacttcacacctgttagaatggcaattattaatattttcatccctgagaggtctcagaaataaaaaaaaacaaattaaaaaataaaaattttttaaaatagaatggctattatccaaaagataaaagatgagtgtctgcaagggtatggagaaagggaacccttatacactgttggaggaaatgtaacttggtatagccattatgaaaaacagtacggcagttcctcaaaaaattaaaaatagaactcctatatgatccagcaatcccacttctgggtatgtagtcaaacaaaatgaaatcggtatctcaaagagatatctgcattctcatgtttattgcatgttatgatatcaacttaagtattcatccacagttaatggataaagaaaatttggtatatatatatacatatatatatgtgtatatatgtgtatatgtatgtgtatatatatatgtgtatatatatgtgtatatatatgtgtatatatatatatattcagccattaaaaaaaagaaaattctaccatttgtgacaatgaggacattatgctaagtgaaataagacagacaaagaaagacaaatgctatataatctcacttataggtggaatctaaaaaaattgaactcacagaggcagaaagtagaatagtggtttccaggagctgaggcaggggtttggggtgcagggtaaggggaagagatgggaagatgttggttaagggtacaaactttctgttgaaagattaaagagcactggggtctcggctgggtgcagtggctcatgcctataatcccagcactttggaaggctgaggcaggtggatcatctgaaatcaagagttcaagaccaacctgagcaacatggtgaaaccccatctctactaaaatacaaaaaattagctgggcgtggtggcacacacctgtagtctcagctacttgggaagctgaggtatgagaattgcttgaacccaggaggtggaggccgagatcgcaccactggactccagcttgggctacagagtgagactctgtctcaaaaaaaaaaaaaaaagtactggggtctctaatgtacagcatggtgacaatggttaatactgcattgtatacttgaaatttactgtgagagtagatcttaagtattctcaccacacatggtaactatgtcagataatggatgtgctaattagcttgattgtggtaatcatttcacaatgtgtgtgtgtatatatatatatatatatatatatatatatatatatatatataaaatcatcacacatataccttaaatatatacaatttttatttgtcaattaaatatatacaaattttatttgattaatatctcaaaaagctggggaaaaaaaagacttaggtctgaatccagattccactgcctataaattaagaccttgggcaaattagtcctttatttgtttcttttcttttttcagagacagggtctcactatgttacccaggctggccttgaactcctgagctgaagggatcctcctgccttagcctcccaagtagctaggactacaggcacacaccactgtgcctggcttcaaattacttctttgaatctttgttttctagtctataagatgggcatgatacccttcttaatctttattgtgatagttaaatgtaataacattacaaaatgcttagtagagtgtctggcatggcagacacttgatgaatgatacttattatcgctattattctcatcatctaagatacttcaatttgatgtagtcaaatattctattctacttatctacctctctaagtgagggctactctgtaacatactgctatggaaagatcaggaatctgccctagacatgtataaataagtactttatgcccaaatgagtataaattttacctctggtataatttctatggggagataaaactttaattgccatataggaaaccactggtgaatttgggatgatttgatgtgcttgttttgggttgcttgttgctgttgttgttgttgttgttgtttttagagatgaggtctcactatgttgcccaagatggtctcgaactcctggtcttaagtgagcctcctgccttgccctcccaaagtgctgggattataggtgtgagccatagcacccagcctaagtttttaccattgggaagcaaatgttttgtggagaagccatagttttgaatagcaatttaaagatgaaaaatagatgatagaggtggagaaaggtgtcaatgggaaaccccacatatggtaagataactatgtgtgccatggaccacaaacaggctagcctggtcgaagcaaaaaggttgatcccgaacataatgggatgagggcattagataggtaaggaagtgactgatggaaaatcaagagtgatagctgatgatgaatggtgatactgtatatgattttgtgcattgatataccatttttcctttctttttccatctacatggatctcaaaaatgagcaatcttctctctggaggtggataagacagaacattttgcaagccctttaagtccttcaggaaacacaaacatcctgtgatctgtcactcaggattctgactcagactgggaatctgagcaatgctcatggcaataagccaggaccaggccctaaacatctggctgctccactgtatggatctttggcatgttaaatgtcaacagaccttgtggatataaagttgactcagtcagaaaacatctacggtctacatggaaaagaaagtcttttggaaagaaaagaaggcagggtgtctgaaccctccatcaggatttccctactccactctatttctattagatgagagggatgaggaaagagtactcagccaccttttcaagtcatctggtggtcagggctatttgtaactctaatctcatattcataccagtcgtttctaaatccaatcccatatttacaccaacctgtcttacaaccttaatttggtttcccaggtgtattccagttccactgtcaaatagtaagtactggattatccctagatagactcaccaaaagattatacaagtccttagaggagggaagtgagactgtagaagagactcagcatccaacaaatatatcacataatatattcaaactactctaagtactacaccaaaacaatgactttcctgaccaccatcctaaccatgacaccaaccctgggtaatttcatctcatcatattgcttcaaatattatatatgctttaaataatataggctgatgccatttttatttctactctcactttcttttttctttctttctttttttttttttttttttttttttgagactgagtcttgctctattgcccaggctggagtgatctcggctcactgcaacctctgcctcccgggtttaagcgattctcctgcctcagccagccaagtagctgggattacagggatgtgccacctcacccagctaattttgtatttttagtagagacggggtttcactatgttggtcaggctggtctcgaactcctgacctcaggtgatccacccacctcagcctcccaaagtgctgggattacaggcatgagccaccacgcccaactccaatctcaatttctgttaaattcagatccatatttccaactgctactctacatcaaaaatttcctcttggctattcttatagcacttaaaactcaaaatgtttacaaccaatttatcttttttctgttccattcactctatctacagtctcatctgaaacaacaaaaaactgcttatctttcatctgtaaccactatatttgttaacacaatcatattcaatacagacacctgagctagaaacccaagtccccactgacccatttgtctttctgtacccctgtcctatctaattagtaaccaaggctcattggtgctaccttccaaattactcttgaatttattctctcctctccattcccaccactactgattaatgtgacacttatcatttcaagtctggactttggtactggacactaactgtctctggtttctctctcttccaatcccatcctttacaatgattacaatataatcatttcaattttctgcttagcatccttcaaagaccattcatcttactacagaggccttcatacttcttcacctgccactcacactctttgctttctgccactaagcagcccttcctgcttctgtctcctgcatgcagcttaatgcatatccatcctctgggcctgtgctcactcttgaaactttggcctagaagtctcttctcctgctgttgtttttactctgagcatctcctagaaatagttcaagcctcagtctcagagtccatgatgccagcaggaagaaagaacagatctctcctccatggttccacagttgttgcatgccactatcacacacttacttgaattcattgatggctatggttaggtgagccactgtgcccagcccggggtctagtcatctttgtagccctagtacctaacatatgtaggcactcagtaaataatggtgaattaaactaaattgaattttaatagcaactgtctcctatttccagaagttcctctaacaatatgatgcaggccttatatttaaaagtagccattattctgataagttttatattttgttgacagctaagtacactaagagtcctgtctggataagggtcattctttggccaatttaaatggaattgtgattatattaggcccatattgtttggaatctaactaacttgtctgatctcagaaaaattacaaaaaaaaaagaaaacacaggtaaaaacccctctcaaggacagcaatgacatagttaactttggctaccaatgcaccttctacattcataattattgtcactgatgctttagagcacccagaatagtgaaatagtgtataactgagacctattaaattctaacaggctaagcacagtggcttacacctgtaatcccagtacgttgggaggccagggcagacaggtcacttgaggccaggagtttgagaccaacctggccaacatggtaaaaccccagaaagcaaaaaattagagtatactcaaaaaagtataaaaaattagtcaggcgtggtggtgtatacctgcaatctcagctactcgggaggctgacacatgagaaccacttgaactcaggaggcgaaggttgcaatgagccaaggtttcaccactaaactccagcctgggagacacagccttgctctgtctcaaaaaaaaaaaaaaaaaaaaaatcaaacaggtagcatagagacaaaatctgtgaaaagctaaacactgaattgatataaataaagtgttctactccttatctcaaaatgttaaagtgctatattttccccactcacataaaaaagtaacaatttatgtcattcaaatgataaagaaataactcatttattttattaaatatgaatgtccttaaggaacaagtattatctttaaaaacctgttcagaattggtaattttatatttacatctatcttctgaattatattacctttttaccacttttgtaggttactatgataaattcttgccttaacaacagctattgattttaattattgagataccaatgatctcgtagggggatgccaattattacgaagtatctgtggaagacaatggtgctgtgtatgcatacagaattagggacactgtcttgctcaatcaattttcagtcaatgagctcatcagctaaatctgatggactgacagagaatccaaacagagtaatacaatgactaagacagtagttggtttgcccagagcagtcagatgaggaagggcatcgagccaagtccagagactcagggcagactccaaatgagctctagctaacaacaagacaatatctcttgttttcaaccctgtgtaaattataaaaacaagaggatgtggccattatggtgtgtttcccaaaaactgttcatgtagctgtgatgtgagcagctaaagaattccacaggccgacagtggagggagaaccttagccctaatctcagggccactggatttagaagcatccacagtaaatccagtaacttattagttttcctcatttagccaggaggtctggaaagggaacttgtctcccaccaaaaacaaaatgatactttgattgcaagtctaaatccaggatctgattttggcaagtcgtttaacctctcaatatcttattgtggaaataacagttaaaaaaaaaacaaaaagtcctatctagcttaaataattgtgctaacccaaggacataactggttagagtctttataaactgcagtcctgtatacaggtaaaatagaatggtgaggaagcatccacctagaacactgacattcttctttcaatccttcataaattattgagcatctcctctgccaggttctgctttatatgcttaggaaagcatgtaaacaagatagcttagatctcattcattttgaagcttccactaggcctttgattcatgtgcaaccagcttgcaaaatgctggtcatacacaagttttgggctctgccctcaagcagaggggcatggagaagattatgagacagatgatgatagtaataagatgatgcattgaaatcagtgcaaatccatttcatctccatcccaacctcacccttttactgcaccattgagtttggggtttggtttaggaggtcctggatgtaaattcaccctctctttgaaataataatggccctcttctcatagggtggttgttctcaatgaacccagtagacataaatatcctgcaggagcttccattctagcagggagattcagacgataaacataaacagaagatattatgtagcatatagttggaaagtgatgactgctatgggagaaaaaaatagagcatggaaaagggattgggagtgcagaaggcacagtagcagctttgatattttaaaaagagtgagaaagcggcagctagaaagatctggattctcatttcaggtcaccattcagaaaagctaagtttgctgtacagtaaggctcaggagatctgatcctgattgtagaaacctctgattacagaatcttggattgtatctcccactgtatcctcctagaccatcctgcaagatctataagagtccttttgggaaatccctaggagttcttggaaagaagaaagattgttggttggaataaaaagggttgaatgagttccagaaagccgggttctcaatctcatggacaacaatctgcagaagaagacaacttcaaaaaaccaactagaagcaacatgcagagatgagaggggcctcctcaggaaagaaggcagctggtccacagcagaaaaatcttgaaccacctctctcaggaagatgtggggtcgctctgcagagaacttcttagcttcaggatccgtgaggaagaccagaaagaacaaacagaggactcctggaaacagatatgggggcagtaccagcaaagcacctcagaccccagggaaggaaagagcctgggcagacctcactgttgaaagcgaggacgcatttaagaacagaatggaagttaaagtgaagatgcctgaagaatcgaaaccatggcttgctggggactggaacttagttaccaagcagaagcagctgttttaactccctgctaagcaaaatgtagatgcaattctaaaggagtatgcaaattgtaaaacatcgcagggaaacgtcgataataaggcataggcagttaatgaaattgtgacaagaataaaagaatatttcgacgtgatgttaggcactcagctgctctacaaatttgagaggcccctgtatgcagaaatcctcttggctcaccctgatgctcctgtgtcccaggtttaaggggcacacacctactgaggttatttgtaagaataggagaaatgttggcctatatatcccttgatgagaagagccttgcgttattgttgggccatttgcatgatttcctaaaatatctggcaaagaattctgcatctctttttactggcggtgattacaaagtagcttctgctaagtaccaccacaaagccctgtgctggtctacagaccattcactgttatttccctgagatctggaaacactttttgttcttagtctttttcttgtaaaatggatattctttaacattgttaatgtaaaacagggcttatgtttcagtttgttttctgttctgttttaaacagaaaataaaaggagtgtaagctccttttctcatttcaaagttgctaccagggtatgcagtaattagaacaaagaagaaatattcagtggaacattttattgcctagttgacaacattgcttgaatgctggtggttctacccctttgacactacacaattttctaatatgtgttaatgctacatgacaaaatgccctgactcctagtgccaaacattcaatttgatatatatacccaaaaacccatgcatttgttctcttttttttaatgatgcttgaagtaaaacagcccatcctctgcaaatccgtctatgttgttccttaggcattctgtctttgcgcaaattgttgaagggtggtcgtttgtttcatggtttttgcatttgagtctaatgcatgttgtaacgtgatagaggcaatgcattattgtgtaagccacagttttctgaaaaagttgatattttaggaattacatttcagatcttaaataaaatttgtttctaaatttcaaagcaaaaaagaaaaaagacagtaagaaagtgtctttggaggaaagacctaaaggtgaggaagtaagacgtgtgagcttgtaggggaagagttctcaacagaggggaaggctagagagggccagaccagcaaggaaaacagagggagcaagtaggccagtggttggagtggtcagagacagccatggtggcatcatggagggccttttgttcttggtctgacctgatcagacttctatttcaaaacgatccttctggctgctctgttgagaacagattgtagaggcaagtataggaagaatgaacccagtcatccctatgcagtggtgatggcttggacccgtgcgatagtagttggagtgttaagaagtggtcagtttccagttacatttgaagttaaagccttcaggacttcatgatgggttaaatgtacaggattagagaaagagcaagagaggagtcacagaagattcaaaggatttgggcaagagccaccagaagatggaggtgccagcaacagagacctgagggtaatgcaggaacctggaactcctgtaccttctcttctcctagtttccagggcatcttcctgcaagtgtataaaactgtaggtagaggaacaaagctgatatggtcctatttggtgactgtaggagagactgaccactaagaccatttcatcccttgagacctcagtctccctacttataacatgagataggtcagttacataaggacagaattcctttcttgctgttaaattcaagaacctagatctgcaatcggttctccaatctttcaagccttctttttgattttttttccttgggaaaacatctcaataatgaaatccaatctttaaaaattttggttttaaacaaaattatattgtgatcagcttgagcctaggagttcaaggctacagtgagctatgatcccaccaccacattccatatatatatatatatatatatacacacacatatatagtgatcaaaatatttgatcaaaatatcaaaaaatgtttttaataagtcagcttctctaaaataaaaataagtatgtcttgcaattgtttatacaataccttgttccagggaggtacatggctaatcaggaaacatatttcctatgttgtatttaatcagaaattttgctcacaaggttaaattacagcattcattttgtgccactgtgaaaatattcccttccattttaacaggactaaaaatgcttccaaagctgcctaaaagaatattcagctcctataggttcttgctgcatttttatttcccttggtaacagtacttttgataacattggtggaagaaaagaagtcatagtaaaggatgaagatggagtatctgatactataacactagcctgatgctagaggagaatgtaatacaggctgaatattgaaaatttgcaacttattgagcaccaacatgacatcacaagtggaaaattccacacagaagtacttaaaacatattgcttcatgcaaaaaatcatttaaaatattgtataaaaaacttttaggctatgtacactgaataagctgtatgtgaaatataaatgaattttgtgtttagactagggtcctcttccaagatatctcattatatacatgcaaatgttccaaaaccataaaaaatccaaaatcttcagacacatctggtcccaagcatttctaatgaaggatactcaatctgtataaattatacacaatttaattattttattttatatatatatattttttagatgaagttttgctctatggcccaggctgaagtgcagtggtgcaatctcggctcactgcaacctccacctctcaggttcaagaattctcctgtctcagcctcccaagtagctgcggctacaggcgtgtaccaccacgctggctaatttttgtatttttagtagagatggggtttcactatattggccaggctggtctcgaacttctagcctcaagtaatctgcctgcctcggcctgccaaagtgctaggattattgacatgagccaccacaaccggcctaatttaacctaaatccagaaataatcccttaaattttgtagctcacaaacgcatcctccctctttccccacaacattccatcagactcagggaacgtcatcacacatcaacgtcgtcatagtttgtatactgagtgctaagtatgtgcaaggcgttgtgccaagggatgtcaggcttaactcacttaatgctcacaaccatcctgtgagaagagggtcattattatttccatggtcagagagaaggtggattcacatccaggacctcctaaacccaatcccaaactcagtggtgcagtgaaagggtgaggttgggttggagatgaaatggatttgcactgatttcaatgcatcgtcttattacgatcagtgtttgtctcataatctccatgcccctctgcttgaggacagaggcgacaaaacttgtgtatgactggcattttgcaagctggttacacattaataaaaggcccagtggaagttccaaaacaaatgagatctaagctatcttgttctcacggtttcccaagcccaagtagagcctggcatactataggcacaccatgggtgctccctgagtacatgaacataaagatgatccacaggtgggtgaacaatactgggggcaggtgaaagggaggacctcgaggcaatactgccagagcccctcctgcttagagtgtccaggcttctacatggggagacagcgcaccccccagacactcccgcccactcctttctggctcgctgagtgacgccagtttcaagcctcagcccacgccaggctccaggaccagcagagcgggtctgcgcggacagaggcactgggctgcgcccgtagcgcaccccaccaagaggaaggcgtgcctagtggggaggcggggctccaggggccgggcacacgcagacacactcctgctctctctacgcacgttctcacactctcattcacaccgcactcaccctgtgcacatccccagtttctcgtattcctcacattcacacattcatacactcatatattcacacacacccatgctcccaaacacgcttcactcacacagctccgcgcacagggatcaaagaccacattgggtacagtgtacactgcttgggtgatgggtgcaccaaaatctcagaaatcaccactaaagaacctatccatgtaacctaacaccacctgttcctcaaaaaactattgaaataatttaaaaataaaaaaggaaaagcaatctcattccctaccctcattctaattcacttttcacctcttcacacaccatcacgcccacgtaccttaatctcactgttgacagtacacttatgctcgcgctcatgcacactcgcccccacctcgccttcgctctttacacgagcttgcgcgcagacacactcaaggactccctacccacttacactcacgcatgcgcacaggcgcacacgctaactctgcctcctcactcgcgctcgtgcatgcgcatccgtcgcggagaggactttgtgcctggtgtgggagcgggtgtttggtggcctttgcggatgggcttgttttgaggctgtggggtcagtgcgatcgtttagatttccttggtttcccagtgagaaataagttagccaggaagagagagaggcggagacccagggagaccgagactggaggaagggagtaggttgaggttttagagccgtgggagcaagagcgccgggtaggagctgtcgcgcagagagcacctcgcgcagccccagagcctgtttgtttaccctcttcctcggagcggcttctccagcgtctcatttcttctgcctcccttgccctcgcccaggtgtgggacgcgggcgagtgaggacagacttacaaccgtcctcggccgcgcagcacagggttcccgcgccctgtccctatgccccggggacacagggcaggaggctgaaaaagggactcagcgttagaaactatggttggaattctccccctgccacttgctatgtggccttggccagtttaccgttgtctcggagcctccgtttcctatctgaaataaggaatcattcattcaacaaatattaattgccatcctaatatatgtcacctctggtctggacatttggcatacactggtgaatacataaaacagacccagtttctgcccaggagcagtttgcagtcaacaagcatacggattgattatgaagagggcttttgaattaaataataaaatattgctttcatccactccaaatgtttttcagcgcttactgtgttctgggcacaggtgaataaaaacaatcatgttccctgtcctcattctaatttcagtccgtacattggactggccctcagaacctttaatatgtaggaaaaccaaccacactaaccaacaaatggacagccaacaaataaggaagtaataaaagcacctacctcacagggttgctgtgagaaataaaggaggcattaaagtcttcagccactgccaggcatatagtaggtgttcaataaatgctaggtgttatcaggtggttagtattgcttagtgcctaaaaggctctgccatcactagctgtgtgaccttggttcagtctttgaacttcagtagttcaaatagggttctccgcaaacataatgaggagaaaataatggcattttatctgggagggctgttgtgcggattaatgaggtcatgcaggcaaggctcttggttcaagaactgccacacagtgagagctcagaaaatgtacctacgagtattgtcatatactcgaaaggcgactgttttcctcctatgcaaagcaggtgggtgtgcagcaaagctgggaggtttctaatatcataggaacgttttgaaatttagggcgcagtcccaagtagggacggccaggacgccagagcctttgacgggggtggggagtggcgaggttaatgtaactgctgaacaaacatatgcccggaaaccgagggatagaaaggccccacactgggcgccttcagggtgcgagcgccaggctgtggaggagccttagagggcaacactcggccgggaaaaggcgcggggggacggagagatgattgtgcagcggcttcctggctcctagttgccaagcccagggactctgatacctaatttacaagcttcaagagcctatggagctgcaggtctcagataataataaaaccaacaagagaagccacgagccttaccaggcaccaggcccggtgttaggcagtcctgaattcctcacaaaaactcgaagacgatggcattttctctattttacagatgcagaaactgaaattctttctccactttcctaggcctcctttcagtttttgcaattaaccaagagaaactctcggaggctcccgtgagcacccttaggtggccgggaacgcattccccatccctctttcccaggccaacacccgcacatcttgcaggtctccgtttaaatgtcacttcaagcttcggttttatcatcacccagagccccttgagcttttctttcatattcacacgacctttttaactcaccagctccgagttaatttgttgattcgcttaacctggaaactccccgggggcgggtcttgtgctactgaattcccttgcgcgcagcctggggtataataggcgctcaatacacactttccaactatcaaatgaccagataaggctcaaaaaagttacgttgctctcttcagattccatggtaggagggcgtagggggcaggatttatcagttatttctcaactacatcagaaccgcatgcagaattctggttgacttctgtctccccctccatctacaccccgccgtgttccagcctcacatcattaaatcgaaatcccttaggtaatcagtatttttataaagctctccaggtgatttttgtagatgaccaagatcaaaaaccagaagggctgggctgctaaaaattataaagaattgctcttattttagtgacttttttttttttaagtctttgctcccataactaagcagctattttggctccaagctttcagaaaatttaggccaagggaagtggggaattggtatgcatgtgaataattcaaccctcctcttacacactcctgcctcccccgcccgccctccaatacaaaaaccacatctctgaatagggtagtaaaaaatagtaagtgccaggagaactggagagggagggagggaggtgaagcatttgcttcaattatccggataattgttccccacctcaggccattgttactgaaatgaaacaatattctattggatactgtcttggccttttcaggcctgctccctgcagtgcctagcacacgctgggcacagagtaggcgctcgataaattttattctgatgacagaggagagctctgagggtgggagagggatgccttgttcggcttgaggatttgggggtgggcgaatattaattaaagtgaagtggggagcagaggggctgtgtggcaggcattcagtgccatcacaacttttttccaactgggccgttcctgaaattctaagccaaacccctcacttatttctcagaagacctccactaccaccccccacccccctctccccgctgcttcttctcagagggccgaattgaactcttgcaactgtggtgagcacaaaggcgaattcaggtttctcaaaagcccatccgttctgaataaacaccagggagaagcaagattatttttggtggtgcatgaacacagggcccacagcctgccctccctctagaaaggccttccctggccttgcattaaaactaacaatattggggcagctgaaggaatagcctggctcctgagccccccatcactcaagcagtacaagaatgtggggactagctcccaactgccctctttcatcttgacccacagcttttcaagaggagcttgagttctctatgagtgtgtatttgctaattgcagccggggctttaatgagattcttttaactcccccaagctcgtttgcaggttatagccttatctggggacccacgttttccaccctggctacacatcctgtgaacaattgcctctccagagcctgaaaggagagcgagcgccccatttctgctgaatacacttctcagttcatccaaggctggcgggcttttgatggccacaatgcaagttacgcccaaagagtgtctctttggtcagatcgacaacgcttggcttcacgtttgcaagttaaacgggcagaaacccggctgaaactcccacgccagacgccagggacgtttccctccgccctgctcagagcaaaactggggaatgggtctgggcggggggaggaaagaaaggaggggtagttgtgagcagagggtgggggagaagagagtccttattctcaacagccatctagaagaagaaaggggggggggcattttctctggcatttcttatttttattttttccattttgctttgttggcagctttacccaaacaaaaaataaaataaaatgagagcattttcttcttgtcttcacctaggtagctgctttcctccagcccctgaaaatgtgactccttcataaaatcaaaatttatgattattcaaatgttggggactgtgaaaagagaggaagaaagagagaaaattaatattgcagctgttcttctgattaatgagagataattgctcatgaaaagtcacccctgtggcattttgttgtctcctggatctttgttcttttccactattattgaggactttcttgaagactaagcggttcttttcaatttttgggtattcagaaagggttgcctggttacagagaatggggaaatctcgggctatatcgggtaagatgtgccacagacagcaatatcacaatgccactcggagaaaaggatggatacaagttaacgatgcactttcaataaaacattcatagacttgttcacgctttgataatgacctcattaaagggagctgggggcaagtaagtcctgtctcctgtttgtgttcggctaacaaaacccagctttgagatcattcatcgctttggaaactaatatgaaatcaatgtaagaggagcaaataaatccgaggcggccccgccaactccccggctgtcccgccctgcctgcagcctccatttggagctggagaaccatgtgggcaaatgctgaaactaagagaaaaaaggactggggatgaaagtggtggtgggggaggtggggaggtttggaggacacagagggaggggcaaagtgggagttacagcctgaaaaaaacagctaagcacaggaacgggtcagaactctggggcctgttgaataagcaatgctaagtccctgccctttacttgtcctgactttgcccatgaaagcaaacaggaagaaagagaagtgagacaggaatgtggggttcaggtcaggtgccattccagagctgggaagaagtactggagaccttttggaagctagaactgagaatccaaatctcagggttgggctgaaaggaaactgctcacccaggctcaacttggagaatcgagagacaagaaggccatgcctctgctgttctttctagaatagctttgattttttttttgtaagttgagggtaagggtggagtgccttggccaggaggaggtacaaagaacaattttgttaccatcacatatgtgacactgtcttgcactcaaggaagacaaaaccatactctattgtcccaagcaagagggagataataaaaagatttcccctttcctttaaaagaactaattttctccttgaattatgaaagtaatggcttaggtaacagcctgtactctgtacccgactgcttaatacagaataaatccttccacgtggctcctggagttgtggcaattagagctcattataggctcataagagctctcattttggggattacttaatggacgatgaaattttatcggacagaatcactgagaaataaaattgtgtggcggctcagacaccatgggcacacgccaatggtctgtctgttccctctcaggaaaagaaagctgaacttggggtctcctgctggttcagggcactgcactctggggaacagtagggctgggcagggctggggtggggggtgggcagtgctgccccgggggcatggagggtaggcttcctttgaggaggggataggcaggtagggccagataggggctggactcagaagagaaggagggagagagactggcagacactgagagatccaaagagaactagagaagtgagtcagagtggacagaaactgtgcaagaaatgggattccagtatacttgctcttggtgggctgaaggaattaaccaagtaccctaagggtcaagtttttcagacatggtcttgctttcagcctcagcctggtctgaaaccactgctccccttgaagtctttaggaaaccccatgagcccctcacatttctcaaaactccttggcactgaaaaatgaaagtttccacagtcagacacaaattgaataagatgcacaagcctcttgcatagttaagattctctaaggtaaaatggtctgcacatgggtgcgatttctaggactttagcataggagctcttcctctgaacacatcccaaactgctgggaacattgtgactcaaaccatcagcccaaaacagactgtggataacctgggacctaacccagaggaggaaaagagagaaagctattattcttaaagagtatctgtatctatatctatatatgcttgtatagttgcaaagtgaatggggggaatcgagtcatctatttggacagtttaggactgtaaaaaatatcctgccattcagcagggtatgttttttattgccattctccatcagtggctccaagccttcttcttggggctgaaatgatttcggggattgcctagatcctccagtcatgaacaagggcgggctggggtgagcctgagcgtctgcagaccttgtggtacaaaagtagttacagctgagctgccccatgttaagccctgagactccttaattgttgtcacaagatgttggattagcacatttctggaatagctgtctgtttacactccagagacccaccgtccactaaccgctttctaattgaattctaatcacattcaaatagctcaataaccagcctcagctgcaattcataaaactttaattgccatccataaatcctgggctccccagagccgggcatccctacaacccaattacacttctctagcaggcaagagagactgtcacagagatggagaggggaagacagaggatggaaagatagagccgtgcctctagctagtgctctcctggatttgggcaccttgttctctcaggtggagggagtcctgtctctaagtttcttagcaccatcatgaactcaggattgaagttagctgctctggaaaaaggatcagacttctaactattgcccaaccacatggccccagcccgcttttctgcagggggaaatgaagagagaaaatggccacctctgctgccttgccttctccgaagataaatagtcccaatagtttggcagccaccctctctcgggcagtaaggggtgtgcaagacttccatggaccagagagagttcccttacaaagccacttctgccaatcagaggcaagattccctggatggctgaatcctcttcatcctttttaggttcttaagatgcagaggaaagagtgcttcctggttagccttgctaagctgcccatgattggtaaaaatgagggacaggaaatcctcagacccagagcgaaggtctatctaatccctgctgcgtctttaggagggcttggtgtttgaggtcctccctccaaaatcttcaggatggagtttgtaggattgccctggaatgccatggtgttactacttggagaaagaaaagggtgactcttcaacatctctctctctctgcggaagtgggaggtgccgatcagaaagggaaacaaggaagggtcgttggtctgagtggccccaggagggccccaagtacaaagacacttcagaccttgtcgaacatcagcatgaaaagcttgacggtttcttagctgggaggcctcacagttctgcgccggacagtcctgaactaaccacctgaatgacctctgccaagtccaaaagctgtggacaggggtaggtgtaaccgtggccagagctgcgctcagggactggacgactgccagtccgtcgcccgcacaatcctgctccaaaccgcaggcctcacacttcaccgcgccgcagccacccctaccacagaggagctggaaacactgagcattcctattaaataagcctccaagtccccacctggtacgctttgcggtggggcgtggggaagagttgggctgcggccagggtagcgagagggggtgggatggaggatgcagcgctgtgatttctcagtaaagcgtggagaaagagggggaggaggccggcctccccgggaaattaacaaaacctacactttgcaaagtctcccccatccccctcccccgagttcttccccgccgcgcgcccgcccctcctcgcggcttctgttgtgactcgggcagcctatcccgagggtgcggagctgccgaggagcctgagccgagcggtactccgcagcatcacgtgccagggtggggggctataaaatacccgagccggggcgccgggcgggggacgtgaggaccagccctctccggggacccctttgttcccagcccagacgccaacacctctgcgtccccaagggcttgactgcccgtgtctgcgcggctcccagggcagagcttagaacactagaggagaggggtcgccgcgaactgccggggcttccagccacccacccctctcgacatgtcgcgctccttctatgtcgactcgctcatcatcaaggacacctcacggcctgcgccctcgctgcctgaaccgcaccccgggccggatttcttcatcccgcttggcatgccgcccccattggtgatgtccgtgtccggccccggctgcccgtcccgcaagagcggcgcgttctgcgtgtgccctctctgcgtcacttcgcacctgcactcctctcgggggtctgtgggcgccggcagcgggggcgcaggggccggggttaccggggccggaggcagtggggtggcaggggccgcaggggcactgcctctgcttaagggccagttctcttcggctcctggggacgcgcagttttgcccgcgggtgaaccatgcgcatcatcaccaccacccgccgcagcaccaccatcaccatcatcagccccagcagcctggctcggccgcggcggcggcagcagcagcagcggcggcggcggccgcggcggccttggggcacccgcagcaccacgcacctgtctgcaccgccaccacctacaacgtggcggacccgcggagattccactgcctcaccatgggtagggcggggtcttggggcacctgcgctccgcgcctttcgcgctcctggagcaaactttccacctccagtggaggaagtgggagcccggggacagggtgaagagagaggacgggcttttagtgtaaccgtagagtcagccacagaagttccacgaaagtggaagttagtttgccagcttctccactcagcctggtgcgttttactcctagtagtaggtgctcgagtattgccttattaatactggggccttagggacctcgaacgtcacggcggataaaccagaggttaactgcttgggatttggggtgggtgtgtttgaacctgtgtggcatccccgcgtcggggcggctaaagcgtcttgacgtttttggctaagcctgcgcgcttctccgcttggctcaaagggaggcgatcagatagtgcaagcccccatccctctttaatcctgtgacttcgcatcctgcgcatcgaagacctttatttgctttgcacgtctcttttcttccccgctaagcaaccacgtgccttgaaatgggaaagggatacagatgttcggctgggcttccccgggtgggtccctgaaatgcgtcctggttagcacatggggtgggagcaccttgcccgagccttacctctctaccctctcttcgccggtccgcaggaggctctgacgccagccaggtacccaatggcaagaggatgaggacggcgttcactagcacgcaactcctggagctggagagagaattctcttccaacatgtacctgtctcgactccggaggattgaaatcgccacttacctgaacctgtcggagaagcaggtgaaaatctggtttcagaaccgccgagtgaagcacaagaaggaggggaagggcacgcagaggaacagtcacgcgggctgcaagtgcgtcgggagccaggtgcactacgcgcgctccgaggatgaggactccctgtcgccggcctcagccaacgatgacaaggagatttcccccttatgagggagggcctcctccctcacatcccccgctcctggcagaccaggcaacgccaaggcgtggggcacccaggggccagaatccttgctcattgcagtggtcccatctggagaagaaacgaacctggaagttctggaatggacaagccgggacctgacccttcgcgtctccttcttgacctgtttatctaggactccaacttgaagttacagatttttttaaaaaatgtaaataacctataattcaactcattcttgtcgtataacagaggaaaaacagggttggtttaagtttaacactgtatggggtttttgaaagcacatgtcagttccccatccctactctctttcagaactcgataagaacacaggatttattgattattttctgttgtcgttttcaaacaaaaacacccaagttgaaaataatttagaaaattagaccttgtaggtcttgctttctgaaatttcgcctggggagaatttaaaatctaagtcgctggaagtccctttgtatgtgaataggtttatataaaatttatatttatatttatttaaataaatgaaacaaaaaccagaattttaaatctgtggtgtttgctctccctatcttctcctgccccctcctccaatgtctagagaaaggcatatgcaggaaaaagctgtctgaggaattcgaggaaaatgttgagtaagaacttggtaatgtgggtctcttgactgagggagtttgtggctcaatgggttttctatgtaacagaactttcgccaaggagacacctttagtcatgatggcatctaccaggcagtgcctctccatccttaaaataggcaacctcctcacagttgataggacaaatcactccatttggaatgacactgaccattaacgacaggtaaacctttatttagcaaggaagggtaaaaatcccccatctagtttttgttttcttctttctacttcctcatttctctcagtacgaaaacttgaattatgtgaaggaatttgtagagtcagaatagttttaggaagagcaacaatccatcaaacaggtcagaagcaaacagtggaaacttaataacgatgctacaagcagaattagcgggtttccctcaatgttaagaaaacaaaaagtcagggacaggaagtattctgttcaaagatttataatctcactttttcaaagcagcccagagatgcctttagagctttgagttttggggctttttttcccggtcaccctaatattcagttaatttggctcccttctagtcccttccagcccaccccccttcccatagcctagcagaatcacttcctttaagcctggtcccagagaagacttatttctagctcttccctcagcagggcaactggctctctcctcagtgcggcctgggcttgttatcttagggagagaagtgaagaaactggaaacaggaaaacgaagagatctcattccctgcaagctgagccccactaatcctcaaccggtgtgatttctgattaggttctataaagacgccacccaataggttcaagccacaggagttaatgacaacacacatacacaagggctttaggtctgagttactagaggccggtcggactgaacctcaccaggtacggctggggttctaaaactggacacggttttccctgagtgttgtctttagcgcgcgcgcgcgcgcgcacacacacacacacacacacacacacacacacacacacacacagtaggctcagaaggaaaatccctcttcgttccgtcaagggacatagggaggagggcccgcactgtgtgaggctgaaaagggagctgccggcgctttgtgcaatgtgctgagctctgtcctgcgcagaggtcccagacagccggctcactactgcctggcctgggaagctcaggcctctggatctctttcctcctgtctctcacgcgcagagctccgggctcttcgccctgcccgccacgaaagggaggaggcgcaggccggctgcctttccaaaagattctgtctcccttcttcccaagaagcaggcctctccgcgcgcgagaacagaggtgggaggacgggagtttgcaggcgcaaagaacaggagtttaagcagactatttccaccaggggaaataagaagcacaaagagcgcctgctgcagctctttgcgctcttgcccaaagctaagcttcctctgggctgtggggagactcctctggtccccgttccatctacccagcccggcccctctggggctcagcgcttgggtttagccctcccctatgtccatgactagccccgatcacagtctcttaagcctctcccggcccccggctcccaggccctgcggagccaagcacttggaacaccaggtaccgcgcgcggtggacccagctctgccatgccgcagatagccgcagtgccaaccctgtttagatggtttggatctgcttggatggccccagcccctcttgcttcgatctttggggaagttccctagggaaaggagaataaacaaagtatttctgcccagaggcaaaaaaaaaaaaaaaaaaaaaaaaaaaaaagcgtagcgatacctatttagatgttgggacactctccatagaagaaaaggttctccagggttcccagggaggtcttccttctaggacatccgatgcaaagtggactcctttggtcactttcagaatggagtatgaggtctcctactatgctagaataagttttacatgtttccctatccccactcctcaaaaaatatcagttgatgtttttgaagttttcaaatcggaataatgctttggtattttggagtcggtctgattctaaagaccaacagtttcactttagtttaagagcatttaagccaaccctcagaaactcacattctcagctaaataatcttgatatcaaacacccatttaagaggaaagtttaagatgtatggggtcacccttgacaatttctctacctgggaagcactagatactagtttccattatgccccaattgaaaaacagaaacagaactatgttcccccagagcatgacctcttagagaggtcatggaaagaaagaaagaatggaaagaaagagaatgaaaatgagaatgagaattagaaaacaggaacttgctccaccaagagaaaatcagtgggtagcacccgctgtgagtgtggttgagtccatctttttgagaacaagtctcatgttagttttaaacaggaaaagagctgggggtggaaggcagagtggagagcaggaaggatgacctctcacccatgtgccctggcccagcccagacattcagagcatagaggaggaacagagacttttccccttcactctcccactcagccaccaacaaatgcctaaggccaagggcctgatactgatagcaaactaggccaaaagcaaaagtgacccagtagcccatccttagggtgtcagtgggcctgcatgatggagacactggtgcccatagacctcttttcctctagggtccttattctgaagtggtcatcatagctcagtcccttccccactcccctaaagaatatctaataattttaggagagacaaaacacttggggatgtgaagtctttgatttctgacctccgcctccgtctcctcattgccaaccaccaccccgctaacccacaacgccccaccagttctgtccagttatatctggtcaggattagaaatgcagtttgcttggcacactctaactgtggtcagacaattgccagaaaggtggtggttctaactaaaagcagtcacagagggcaacaggggctttgtatgtacatgtgtgtagtgtgtgcatgcatgaggcacatgtgtgtgtgaaagagacagagagggtcctttgatggtggtgatgtaggtggaaaagagtaatttttaaccaggttttctttttctttttgtttcccacttatacctttcctgcaggttccactcgcttttaatggcactccttgagagatttctttgagggagatggggaggtgctcagtgttgggttgtggggaggaaaaacagtctgaacatggaggggagacatggagaagagctctggggcatgatctcaagcccagccttacgggtgtgagagaggggaggagaatgacactccaatagaacctatttgctagaggaaatcaagtttaaaggagcaatcactcctttcaaaagagctcctcccatcttctccaaacacagcccaaagctgtcctagacgatgaatgcagttcagtgcatcaaagcaattgttcctattttcattattcacaggaaatctttgaatgtacctgttaaggtgacagaccttttaaaagggaacatttttttccatgcaattaaatggtgcatttactaggcgtctattaacataatttaatataaatctattttataaatctttaggctcacattactgaaaattgagcttctcttaaaaaatgcccacatctcttccctaaactacatagaatagaacccaaaaacttgctattctaagccagctagaaatattaaaagtaatagaatcctttgtattgtcttttgttaatggtgggggtatgaagaaaaggggcaacttgtctcatagaaattctataaggacccgaggcttctacatccaacatctggcacttggagtgggcaacacaggctggaactaagggaggggccaaagaagcacagaacttaagacatctcttagaatcagacttgaatcagaactcagattaaaaaaaaaaaaaaactaaaaaaaaagaaagtcagcaaaactccaacttgcaaagaaatttggattccagtttcttctgtttggggaaaaaaattctgaggcctgtgagacctctagtgctgctccatgtggcaatagataaccttgtctgttgccatagccagactacttattctcaagtgtaccctccaaaatcctgggcatcccattgtctctgaaaatagtgttttgtgctctcttaatatactgatgtcaatgccgcccttcggtactggacactgcttttcttcaagctgagccctatgttttcctgaacccttgctgtatctttgttgagccttctaaatcccaaacccaggaaggccccaggggctcccctgagtgaatcctaacagatcggaagtgtatgctgtgtgcttaggaaagtaactagtttcagattaatgaagcagtgacaatttcaatctgcttaaaggcggaggttggcactgcccaggcctgagcgtggggagctcgccaggctgggctttatattgtccccttttctgaagagcagacaaagatggatagagagacattgaaaagcaaggggagtatttcaaacagtctcataaagcaggctgtcactttaagacaagaaccatagtgctttgatgactttgtattagctgcaccatttcaaataggggactcaagtctctagtgagagggaggcaaggggagagaggagagagaagacaagagagagagagagagagagagagagagagagagagagagagagagaatgtagtaatatttagcctgtgagcactgtggcgaaagtaattctaggcaactacttggtttctgaagttcaaggagaaaccacccacagcaggtgcagagaaaaaaaggcaggtgggagttgctcccgatgggaaagagctccctgcctatgagtggcagccggctccaaggagcagaagccagcttggtctcagtttgctgcgaagggatggagcagggtgagaagctctgcctgccccagaccttgaaggattataatggaaatttttgagagtgtgaaaaagaaagaatacgaaggagagggagtgcatgcttttggagacttccttcacaaaccctaatttagattgtttggggtcaagcagcagccagccaccttcctcctttcctccttaattaattaataagaatgattaattattaggattttgaatgtcaaggcttcaaaatgcctttggctagaggctgatgagttgcttaagccatacatgtagttttaacttgggataagggagttgagactttagaggtgtgtttgctgtcactctgtctttttttttttttttttttttttttgcctttgcatctgcttccccagtgatctttctctgtctgcatttctctgtcttgtctccatctccttctgccttgatatccgcccccacccccaccctttgttctcctggccgttttccccatccagtctcccctggccatggctcaatcctcctagctctccggggaaagaggaggatgctaaagctgccattcctacttgggtatctactgcgggcacaggcatctcggaatcccactgcatcatcggtggcaggaagtgggtgggcattaatgtagtttcactcgctggatcgagagttattgacagcttagattttcttttttctgcttgtcaaaaatttctttctctttcttttcttctctttttttctttttttttttcttggatacgggaaccagaaccacgaaatcctgcaagctttgaaggccggcgaaagggctcccccgtcggtggcgccggagggagaagcgtttagtcactgtttcattaggcactatttgaaccttgcaacatgtggtaatttctggggcaagctgaaaaggggggattatgtaggagggacataaggaaattagccaacggttaatttaactcgttttctgctagacttttcgatacattcctaattgactgaggggcaggtgaagctcccgccccatgcaggctcattcacggtgggaataaatggctctttctcaactcacactgctcacaatatatcatcagggaaaagacatgcaatgaatatgttgattttttttattaatggaattacaccctgccatgcaggtgtgagggtaaaaacctatactgcaatgaaataagattaacaatgaaattagaattttattagctttatatgtcacacagacctggatttgaactgtcaaaacaagcaacaagaaaagatattctgaacgcagccctgtcaatcaaccaggagaaacgaacagcgtggtatcgaaatcataatcaccttccagttcttcagcgcctcacttgggccttacgtgagaagcaagtgggtggaggaccccgcgtgggcaaaggcctggtctctggacctgcagatagtagatgaaaaacaccacctgggttcggtagacccggcctaaaaaaggctcgggtccaggctagaagggcctggatggcccgaggcctccaagatatcagacggaccggctgggcacccgcggcctgcaggccatatttcgcgtcctccaaatcagctgcctagggcgggccgtgacccgagggaattggagagaaaagtccaaacgctgggcgagaggcggggtagggcgccctttggaaaccgccctgggttttgttactccggggcccccggagcttcggcacagctacctgggtctggcaggcgcagaggtgccgtatgcaaatggttcactattaggcgagaaagaaatacttcaaatggccctttgtaaccttctatagaaaatcgaggtactctgcatgacaaagcacaattaagctttctattcaggagttctgcagctggtagcccattgggaaagtgggaggaaacgcgaatatattaatagtgtggcgaaagttttttgtgtgcgtgtccttttctaggtcgggggtggggaggggcggtgggtggacgcagagggaggaaggctcagccttggatccttgccacctgaacaacgtcgcctctgcccacgtggaaagcctcgcttgtctggcagccggggttctgaatggttgccgcgacccctgcgctcccagcagggccaagaggacctcgcgggcaccagcgtccgggcgggaagggacgtgtgcccaagcctcgcctcctggccctcagtgggctgggacgcccttgatcaccggcgcaggaaagaggctccccagcccgtgagcttcgtccgggcgccagggcagggatggctggtggtgtgcactggagagcacgacggtgacgctgcgtgggaaagagacgtgggaagggcatagccggattatccactcagctccaattttctccaagcgccactcaccccacagttgaggttcgcttcccgattgttcatttgtagagtctaaagggaaagaaaattttgcctctgaataaataaagggcccttaaaaacaactctgctgattatcctgcgttttccatctggatccatttcgccctcttctgccctgctgggtgccctcggacactgacctttgtggacagtattagttcctttatcaactgcgtcactggcaggcgcttgcctctggcttccatttgcatttggtgaataagtggcactgcaaataaccgaacaacctaaggatagagaactgcaggtatattgtttctgggaatgttatattgttccagttctggcagttgctgcttctctagaaattctttttctctttgagagcctattttcctaggctctggcttttaatcagactccccctgtgccttcaggcatgaagtggaaatgccttctagtttctgctagtcccctgggtgcatcaaaattcttgttagttccattagccctacacacatctctgcaaatagtcgctttgttgaaaagtgtctttaaaaaccctagctcacattggttacctggctcctgatcagccatgttatgtttaagtcaatcccttctataacagccagctcaactgtcaccatacttttgctgggacaactcctgtgagaggaactccaccctctaacccatttcattttcagacagctttgaccattagaaactttcttgtgttggattagaatcttcattcagtattttttatccattgggtcctacctagttctttctccatggaacttctaagtgtctgtcttctccctattcccaactgtgaggacattgatgacagcaactgcatctttcatctctatatccttagcattcatcacaatgcctagcacctactagcagatgcccagtaaatgctagctgggtcagtgcatcatcttacttccaagtctctaccagttgcatcaatcatggaggacttagaaacagctatgatgaaatatagcttgaagatgggatatatctataggtgtgtgtatacacatgataaatatatgtaaatgtttatataggctaaatatcatgtacataaggtaaatatattgagaagtttctggagacaatctacgtgctttaccatttactagcagtgtgacctcgggcaattcacttcatccctctgacttccacttgcctcatttgtaaaataaggataattaatagttgagaattaaataaggacattgatagttaaataaggaaatagatgtgaagatatatagctatttagataaagtagccatggaaggtctaactgaaaaagtaacttttgaatagagacctaaagagaatgtggagaactgatcacatggcttgctggagcaagagaattccagacagaggtagaaacaagtgcaaagacgtagatgggaacatgcctgcaaataaaaaatatgtgggtaaatataaaagatgtttttaaaagatctcttttaaagataattgaatattttaaagcaaaaatagtaatatattgtggagtttataacatacagtttttttgttggtttttttttttttactttttaaaaaaaaattagagatggggtttcactatgttgcccaggctgattttgaactcctggactcaggcagtcatcccacctcatcctcccaaaatgctgggattacaggtgtgagccactgtgtctgtctcagctgattctttttagtcatgatagttatgctctgtaaagttgttgaaaatgatgaattagtgaacactgaacattgttcacaggggaaatacagagttagattctgtaaacctctggttgcaacacttttgtcaagcaatcaacacataaccttgttttatgtgtgtctctatttaaagacagcttatgtaatatatatcattgatttattaacatggagctcacagccaacatgtctgaacaaagctcatctaacacacacataaggcacatccatgtcttctcgtactaggaataccagatataattttacaattgcccctgggagccatttttttatggtgaaaaatatatatggcataaaatttactattttaattatttttcagtgtacaattcagtgccattaagcatttttatattattctgcaaccaccaccaccaccattacccatctctagaacgttttcatcttctcaaatgaaacctccatacccattaaacaataactcccctgtcctgtgccttctgccctgacaaccaccattctactttttgtctctatgaatttgagtactctaggtacctcattgttctgtgaaagggctgtatatgcaaagagatccccaaataccaaagaagtgaagaaatcaaagaaggaagcagacaaatccagtttgttggtatgagattatttatcaggggaatttatggacagaagcatggtcttgggggctgcaagacaggtagatcttagcaccacaacctcccagatccttagggaggctgatgtcttggggaaaagtataaaaatatgtgctctggaaggaatgtataggtgctacaggaatcctagcctatgatgtttgtaacagcattaagtgttgttttggaggaaacttacagtgactagctgtttctacacaaaaagtactgacacctagacattatggaggcatttttggactcagggttagtcagaagtcactcttgttcccacactcatataagtggaatcatacaatatttgtccttttgtgacaaggttgaataatattcccttgtatgtatacgccacattttgtttattcattcattcattgatgaacgctggggttgcttctatcttttggttattatgaataatgctataatcacagtgtgatatgaacgcaggtgtacaaatgtctctttaagaccttgattttagttctttgggtatacacccagaagtggaattgctggatcttatggtaattctatgtctaatgttttgagaaattgccatactgtttttcacagcagctgctccattttacatttttcctcagcaatgcacaagggttcctgtttctccacattttcaccaacacattatttgttgttgtcattttttaaaataataagtaatagccattctaatgggtgtatgtgaagtggtattttactgtgttttgttattcatttccctaatgcttactgatgttattttttatttatttatttttttgagacagggtcttgctctgtcgcccaggctggattgcagtggcatggtcttgactcattgcaacctccacctcctggcctcaggccatcctcctacctcagcctcatgagtagctgggaccacaggcatgtactgccatgcccagataatttttttttttttttttttttgtatttctagtagagatgggatttcaccatgttgaccaggctgatcttgaactttggcctcaagtgatcttcccacctcagcctcctaaagtgctgggattacaggtgagccactgcacctggcctcattttgaccatttttaaatgtacttattggccatttgtattttttttgaaaatcatttatttgaatcttttgctcattttaaaatcaggttggtttttttggttgttgcattttaagagagttctctatatatcttgaatatcaatctcttatcagatatatgatttacaaatactttctcccatttcgtggattccctttcaccctgttgatagtgccctttgatgcacaaaagttttcaatcttgaagaagtccatcttatcaattttttcttttgttgcctatgcttttgatgtcatatccaataaatcattgtcaaacccaatgtcataaagcttcttccctaattttttttttgagacaaggttttactctgtcacccaggctggagtgcagtggtgtgaccacagctcactgcagcctctacctcccaggctcaagtgatcctccaccctagcctcctgaacaggagggactacaggcgtccgccactacgcctggctaatttttgtatttttatagagatggggtctccccatgttgcctgggctggtctcaaactcctggactcaagcaatccactcttcttggcctcccaaagtgctgagattacaggcatgaaccaccacgcccagttttatgttttcttttaagagagtttatagtttatagttgggtctttgatccattttgagtttatttatttttaaaatagttttaaaattttcattgcggtaaaaaacacaacataaaatgtatcatcttaaggtactgggggttatgacttcaatgtgtgaatctgaggggacacacttaattcaacctgtaatgacaaaatttgaggaaaaactaggtttttatccttaggctgtgttgatttcagcaaaccaaagtgatatttaagcaaatattctttaattatctgattgataaacataaagctcttgagcaaatgtgagcccaaaacacaaaatagacaaacaactctgcctcttttctctcacagcatattttatgatctgtgtaactgtattagcccctccgaacttctacttgatttctcccccaaaggcaaagcatctggaagggtcactgagccaggaatttctgtatatcttagttatacatatgcactaaaataagattttaaaaattgtggttaaaaaacaaatcataaaagttaccatgttaacaatattttttttttttggagattgagtccagctctgtcgcccaggctagagtacagtggcgtaatcctggctcactgcaacctccaccttccgtgttcaagcaattctcctgcttcagcctcccgagtagctggcattacaggtgcgcaccaccttgcccagctaatttttgtatttttggtagagatggggtttcaccatgttggccaggctggtctcgaactcctgacctcaggtgatccacccacctcggcctcccaaagtgctaggattacaggcatgaaccaccacgcctagcccataattaaccttttttaagtatacggttcagtagtgttaagcatatttacattgttatgaaatagatcaccagtactttttcatcttgcagaactgaaattctatatccattaaacaacatctccccattttccctttccctcatcccctggtaacagccattctactttctatatcaatgaattcgactattttggataccttatataggaagaatcacacggtgtttgttcttttgtaactggcttgtttcacttagcataatgtcctcaagggtaatctatgctgttgcatgtgacaggatttctttccttcttaaggctgcatagtattccattgtgcatacatattgcattttgtctattgattcatccatggatggacatttagtttgttcccaactcttcgctattgttaatagtgctgctagatataggggtttgcaaatctctcttcaaaaccctgatttcagttcttttggagatatattcagaagtgggattgctagaccatacggtagttctgttttaactttttgaagaaccaccatactgttttccaccgtggttgtaccattttatagtcataccaacagtgttcaagggtccaggcctctccatattcctgccaatacttgctgttttctggggttttgcttgtttgttgtttttgatattctaagaggtgtaaagtgatatctcattgtggttttgatttgcttttctctgatgattagtcatgttgagcatctttgcatatgcttgatggtcatttgtgtattatcattggagaaatgtctactcaagcagatcctttatccatttttttcacttttattttagggtcagggctacatgtgcaggtttgtgatataggtaagctgtgtctcacaggagtttggtgtacggattattttgtcactcatataatcagcatagtaccagataggtagtttggccatcctcaccctcctcccaccctctaccctcaggtaggtcctggtgtctgttgttcccttatttgtgttcatgtgcactcattgtttagctcccacttataagtgagaacatgcagtatttggctttctgtttctgtatttgcttaggataatggcctctagctccatccatgttgctgcaaaggacatgatcttatttatttttattttttttgagacagagtctcgctgtgtcacccagggtggagtgcagtggcatgatcttggctcactgcaacctccacctcccggctccaagtcattctccttcctcagcctcctgagtagctgggattacaggcacctgccaccacagccagctgttttgtatttttagtagagacagggttttaccatgttggccaggctggtcttgaattcctgacctcattatctgcctgccaaagtgctgcgattacaggcatgagccaccgcacccggcgatctcactcatttttatagccacacagtattccatgcctttacccacttttaaaatgggttatttgatttttttattgttgttgagttgtagttgtttatatattctggatcccttatcagatataggatttcaaaatattttctcccattccataggttcccttttcactctgtggactgtgtcctttgatgagcaaaagtttttgagtttgatgtagttccatttgtcttttttttcttttgttgctcgtgcttttggtgtcatatccaaaggaagaaatcattatctaatatttatcattatccagtgatatccactaaatcattgccaaatccaacatcatgaagcttttcccctatgttttcttctaggagttttataggtctaggcctcatgtttagatctttaatccattttgagtccatttttttttttttttttttttttttgagacggagtctccctgtcacccaggctggagtgcagtggcgcgatctcggctcactgcaggctccgccccccggggttcacgccattctcctgcctcagcctcccgagtagctgggactacaggcgcccgctacctcgcccggctaattttttgtatttttagtagagacggggtttcactgtgttagccaggatggtctcgatctcctgacctcgtgatccacccgcctcggcctcccaaagtgctgggataacaggcgtgagccaccgcgcccggccttgagtccatttttgtatatggtataagataaaggtccaactttattcttttgcatgtggacatctagttttctctttctttctttttttctgttttttttttttgacagagtctcgctctgtcgcccaggctggagtgcagtggcatgatctaggttcactgcaacctccacctcctgggttcaagtgattctcctgcctcagcctcctatgtagctgggattacaggcatgtgccaccacgcccggctaacttttgtatttttattagagacggggtttcaccatgttggccaggctggtctcaaactcctgacctcaggtgatccgcctgtcttggcctcccaaggtgctgggattacaagcgtgagccaccgcgcctggcctgacatccagttttcttgacactatttgttaaggagtctgtcctttccctattgagtatggctggaagccttgttgaaaatcatttgaccatatgagagggtttatttctgagttctctattttcttccactagtctctatatctgtctttatgccagtaccagtctattttgattaccatacctttgcagaaaatttttaaatcagaaaatatgagacttctaactttcttctttttcaagattgttttggctatttggtggttccttgagattctacatgaattttaagatggacttttctatttttgcaaaaaaaaatgtcattgggattttgataggaattgcattgcatctgtagatcactttgggtaatattgacatcctaacaataccaagtcttccatgaacaccagatgtctttccatttacttatttctttcaacaacatttcatagttttcagtatacaagtcttttggggggccactttaaacagtgaaatcatctacatggaaagcacaacatataaacaatgtggcaataactagaccaaaaataggacacttatttacattagaagagctgaaacaaagaagacaggcattgccttatttcttctgattggattgtgaacctcaagggactcaaagattttgctgctctgagcatgttcacaaataattacagaattaccatatagattttggagttacaaataaattgtagcaagtaggtgactttacaaatatagaatctgtaaataatgagaataaagtgtatacagaagtaaagtaaaaggcaacaatagcacagaaactgggagagaaaaatggaagcacactgttgtaaggcttttatataataggccaaattcttctacaaaaggtggtctaggccaggtgtggtggctcacgcttgtaatcccagcactttgggaggctgagttgggtggatcatttgagatcaggagctcgagatcagcctggccaacatggtgaaaccctgtctctactaaaaatacaaaaattagctgggcgtggtggcacagacctgtaatcccagctacttgggagctgaggcaggagaatcacttgaacccgggaggcagaggttgcagtgagccaagattgcaccactgcactccagcctgggcaagagagcaagactccgtctcgattaaaaaataaatcaataaaaaggtagtctaatattatttgaaaagagactgataagttaagaaggtacactgtagactttgcagggtgtagttgtgtgtacccatagtcccagctacttgagaggctgaggtgggaagatcgcttgagctctggaattccaggctgcagtgagctgcgattgcaccactgcactgcagtctgggtgatggaagtgagatcatgtctgtaaaaaagaaagagaaaaaagaacaagtgaggaatgtacactgtagaccccaaagccacaaacccagacaaaagagaacaaataaaaagagatacaaccaataagctaataaagactataaaatgaaatattaaaaagtagtgctagtgagagataaagaattaaaggaactaaaaagtccactaatgaaagcgtaatgactgaagcaagaaatagaccaaatgtgaagtgttggtttatattctgagcatattaggagaaaggcaaactggaatctattctggggaaaatagccaggacatgcagtcttgttgcttttgccccctgcttgtctctccaaagatgatgatgagctcatctcctcttttttcaatcctaatgaccaagagcttatattattgagaagtaacggttctgagatatggcaattgttagtcaaggaaacaattcttccaagtgtgattagtttgtgataattagctggtgttactatgtcgaaatgatttgaactgttttagtaaactatgcagggctactgagcaatgcaaacacagttttatgattgtaagtaaactttaaaaaattactcctggatatatatccagagtcaatgtggatagccttgctaaagagatgaagattatgttagtatttgtaaaaacctcaaagaatccaaagatatctttaaagaaacatatatatattattttcttttgagacaggatctcactgtgtcccccaggctggagtgcagtggcatgatcatggctcacttcagccttaagctcctgggctcaagcgattcttctacctcagtcttctgagtagctgggactacaggcacgtgccaacatgatcgggtaatttttttgttttgttttgttttgttttttgtattttttgtagggacggcattttaccatgttgcccatgctggtcttgaactgctgagcccaagcaatccacctgcctcagcctcccaaggtgctgagattacaggtgtgagctaccacacctggccaagaaaccacatttttttaaaaatctggaaatatagtcacctgtgtattgagaagaagcttaccaagatgaggttttatttatttaattaattaatttattgtttttgagatgaggtctcactctgtcacccaggctgaggtatagaggcattatcacagctcactgcagcctcaatctcccaggctcaagcaattcttccacctcagcctcctaagtagctgggaatgcaggcaagcaccaccatgcccagttactttttaaattattattattttgttttgtagagacagggtcttgctatgttgcccaagctggtcttgaatgtctaggctcaagcaatcctcctgcctcagcctcccagagtgctgggattacaggtgtgagccaccatgcccagccccaacaattgtatatatgagttacagttgatctaaaatttcaccaactctgtagactcaggcttcttaacttttggcaatccagtgggtgtaaaatataattccttatggtcttattttgctaattactagtgagtttgaggaactttcatatctcttttcaccattcatattttctcttttgtgagatgcctgctcatacttcctgtccagaactatattgcatcatgtgtgttttactgatttactgttttatggattactaattttttggactttggatattctggatactaacccttcaatgattataagtgtagcaaatagcttctttatttctctatggtgccttttaaagaacaaaagttctttttttttttctttttttgagacagagtctcactctgtcacccagggtgcagtgcagtggcgtgatcttggctcactgcaacctccacctcctgggttcaagtgattcttgtgcctcagcctcctgagtagctgggattacaggcgtgcaccaccatactcagtttttgtattttttagtagagatggggtttcaccatgttggccaggctgatctcaaactcctggcctcaagtgatccgcccgtctccgcctcacaagtgctgggattacaggcgtgagccaccgtgcctggctaaaagttcttaattttaatgtagctgaatttatctgtgcctttcaatcttgtttaagaaatacttccctaccttaaggttataaaaatattatcctataacgttctctaagagaattcaagttttgtatataatacagcagagactgcttctgtgtatgatatataagtatatgattttctttgttttttttcataacctattgtcccaacaccatttactgaatagttcaccatttttgtcataaatcaagtgtccacgtaagtgtgggccttttttttcaggctttcaattttgttcagatgattactttgtctatctgaactgatactaagctgtgttaagtactatgtcatctatgataagtcttgctatctgacagggcatgtcctcactcatgttttttgttgttgttgttcttcagggctattttaattattttggggtcttttatctgttacataaattttagagtcagcttaagttactcaaatactccttttgggatttttataggaaaagcattgagtctgtaggtaaatgtgggggatgttgtgaagtgtagtgtgtaattgtataattatatacattgtataatactaagtgttctctcatcaatgcagtgtgtttctcctttgtagtcttcttcatatcttttatttctaggtacttatatttattactgctattgtaagttttatcttttgaaattttgaaatcattttatactcctaaaggtgtaaaaatagcataaagaattcccaaatatccccttcactaagattctccaaatgttaacattttatcttatttgcttctctctctctttaaatatatatgtgtgtacacatatatttatttatgtattttttttcttaaatgtttgaagttaagttacagatttatagtactcttaagtactttacctctaaatacttcacaatgcatttcctaaaattagatagtttttctgggtatacaatttaagattgacagaattttttctcaacactttgaagatattattccactatctcctgccttcccacattatgaaaaagtctgttatcactctaattgtcattccattattggtaatctattttatctcagtagttgcattctgtgtgtgtgaggggagtggtagggaggggcattggtgttttgtatttcacagaaatatgtttaagtgtagatttctttctatttgttttccttggtattcattttccatctgtatctgtggatcaatgtcatacattgcttctggaaaattctcagccataatagcttcaaatttttttttcttgagacagagtctcgctctgtcacccaggctggagtgcagtggcgcgatctcggctcactgcaacctccgcctcccaggttcaagcaattctcctgcctcagcctcctgagtagcttggattacaggtgcctgccaccatgcccagctaatttttgtatttttagtacagacagggtttcaccatgttggtcaggctggtctcgaacctctgaccatgtgatccacccacctcagcctcccaaagtgctgggattacaggcgtgagccaccgtgcctggcaaatagcttcaaatattgccacttctcagtcttatctgttctctacttctggatttgaattagatatatacacttctatctcttatcatactatccatttgggagtgagagggctgtattctggataatttattctacccaacttccagtttactaattctgttttaagctgtatctaatttttatccatatattcaaatttttacttcaacaatttttaaaaactaaaaattcactttggcttcttctaaagtctggccactttggataatcttttattcctcatatttgtgtttctgtaatttattgctttatgactcctatttatttcttcttgtttgttttctttttcttccacatcagatggataacgtactgacatcataacaaggtttgagggaagcacatctcacacataaacatgaaaacccaatcatcgcatttatgaactacaaaaaagatctcctatttatttaaaacatcttatacataattaaaataattaagggtgtccaaatctgttgtttgtgatttcagctggctctcactcagaagaaactcattaacacgtatgcttggcagtcagatttcattaaccttaacttgtagaaaatccgtcgaatgaaactgtgagcggaatagcttctgctaggagtcacttttgttccctttctttaatcaggaaagctcagcttcagcttctattttttttctattgacccaaaatttgaactctacattgcagagctgatatcacatatgcctgcaggacaagctgactttttaagcatcttaggacttctattctggtgtcagttcaaggtttggacctactgtcagaggtttaccttatttcctggaagcccagcaataaacattttgttttgtgcaggatctcattattttgtagtagggaattcctttagactattttgtctaccacgtcagttttgttttttttttctttcttcagctgaggaagatttttttccccacttttttttttttttttttttttttgagacaatttcactcttgttgcccaggctggagtgcaatggtgcgatctcagctcactgtaacctccggctcccgggttcaagcgattttcctgcctcagcctcctgagttgctgggactacaggcatgtgccaccacgcccagctaattttgtatttttagtagaaatggggtttctccatgttggtcaggctggtcttgaacttccgacctcaggtgatccacccacctcggactcccaaagtgctgggattacaggcgtgagccactgagcccggtctggttattacttcttatgttaaatggtcaaacttatcttaaaggtattatggtcagaatggcatgtattggttcgacagctgtcaagtagatctgtaaatagaatagagattgtaggaacatatttaggtatttgttaggacttaatatatgacaaagatggcactgcaatcattgataaagtatggtttatgtaataaatagtgtaacataattggttatgtatatgaaagtaagaggtttccttcctcattccatatagataggtaagttttatctttaaaattcacttaaatgtaaaaacaaacctatacaaatatatgaaaaaatggagaaaagtgtttttatagcgtcatggtggagttgaccttaagcaatgtgggaaattcagaaacaacaactgaatgttggcagaattgactactatctcatgtttaagaatttatcctatacgaaaaagtcagttaacaatgaccaaagagtccagtcttaaggatggatgagaataggctgggcgcggtggctcacgcctgtaatcccagcactttgggaggccgaggcgagcggatcacaaggtcaggagattgagaccatcctggctaacacggtgaaaccccgtctctactaaaaatacaaaaaattagctgggcgtgatggccggcgcctgtgatcccagctactagggaggctgaggcaggagaatggcgtgaacccggaaggcggagcttgcagtgagccgagatcgcgccactgcactccagcctgggcaacagggcgagactacatctcagaaaaaaaacaaaaacaaaaacaaaaacaaaaagatgaatgagaataatgatctggattctgtttaagtctgcttaaactaagttaccttgaaggtctatgtaagataaaaatgcaagtaggtagatgtggtttcccattgcctcctttgtctttttatggaaaagtctccaaaggtcagagatgctaacaattagttgttagcatagatatagaatgagatgtctgcctggtgagagaatcacaacaatgtagaatttaggtcttttatatcctcaagaaggtcagctcccaaaattatacttactattgtaaaaagtaaccatccttggaaaggcacatcatccccgaaccaaatggctgcattctagaacatgtaattcttgctgtattgtcattgaaacaatatttcctcatctgttctcatgcggaagaattttttttttaattttccttactttggggctttccatgggctaccctcccttggcctagccagccagtacataaggtaatacacaaaaaatcctggcatagtgactggtacacaataaatgtttggtaacttttagcattataattagacttgttacagacaacatgcactacttttgtaattagaaaaaaagccccctaaatagaaaaatagaggaaagaaatactaaaaaaagtttaatatgtttgcacattgacactgtaattccagttctaaaaattgttcttcagaaagaatcacacaagtacaaagatgtgcataaaaggttgattgtatcagcattgtttgctataggaaaaattataaacagcctaaaagttcaggcattggttaaataatgtataatatattaattatatagaatacaatgtaatcttatatatacacactaaatgtgatactaaagtaaaaaatatacatgcagaacattactttaatcatttaatcaatgaatatttattgaatgattactatgcattagacactgccaaaaattagggatataatgttaaagaaaacagacaaaccctcatgaagcttatatatacatatcaacagcagtggtggcctttgctttgtagaattggggctggaaggaagtggattttgtaaatttttacgcttcctttttttttgagatgcagtctcactctgtcaccgaggctggagtgcagtggtgtgacctcagctcactgcaacctctgcctccccggttcaagcgattcttctgcctcagtctcctgagtagctgggactacaggtgtgcgccaccacgcccagctaatttttgtattttagtagagacagggtttcgccatattggccaggttggtctcgaactcctgagcttgtgatccgcccacgttggcctcccaaagtgcttggattacaggtgtgaaccaccacgcctggccatttttactctttttactttttatacttagcttatacaacattgtattgtaagacattttctagaatgattgtataatttaaaacccaatagattttttttttttttttggaagcagagttttgctctacggcccaggctagagtgcagtggcatgatctcggctcactgcaacctccacctcctgggttcaagcgattctcctgcctcagcctcccgagtagctgggattacaggaacaagccaccatgcccagctaacttttgtatttttattagagatagggtttcaccatgttggccaggcttgtcccaaactcctgacctcaagtgatccacctgccttggcctcctaaagtgctgggattataggcatgagccacggtgcctggccccagtagatatattttttaaaattttagttattatttctgtctgagtctgtctgtgctgctataacagaatactataaatgagtaattgataaagagtgtaaatttatttcttacagttccaaaggtgggaaagttcaagatcaaggcaccagcattggtattttgtgagggctgctgtctgctcccaagacgtcaccatgttgctgtgttctcaagtggtggaaggcggaagagcaagagagcaaaaaggacctaagctagttcactccattcatgagggcagatcccccaggacctaatcacttcccaggaggtcccagctcttctcaggccatcctcctaccttggcctcccaaagcactgggattacagatatgaaccaccacgcctggccactggtagttaatttctttttttaaaaaaattattatgttaaaacttttgtgggtacatagtaactgtatatatttatggggtacatgacataggcatgcgataagcaataatcacatcatggaaaatgaggtatccatcccctcaagcatttatcctttgtattacagacaatccaattacactcttagatatttttaaatgtacagttaaatatcattgactataatcactcttttgtgctatcaaatactaggtcttactcattctttctaactgtatacactttttgttcccactaaccatccgcaggctgggcggagtggctcactcctgtaatcccagcactttgggaggcccaggcaggcagatcacttgaggccaagaattcaagaccagcctggccaacatggcgaaatcttatctctgctaaaaatacaaaaattagcaggtgtagtggtgggtgcctgtaaccccagctacttgggacactgaggcatgagaactgctcgaagctgggaggtggaggctgcagtgagccaagatcatgccactgcactccagcctgtgacagtgtgtgactctgtctcaaaacaaaaacaaaaaccatctccgcttacccccaacccctcactacccttcccagcctctggtaactatccttctactctctatctccacaagttcaattgtactgatttttaccacccacaaataagtaagaacatgtgaagtttgtctttctgtgtctgacttatttcacttaagataatgacccccagttccacacatgttgttacaaatgacagaatctcattcttttcatggctgcatagtactccattgtacatatgtatcatattttctttatccagtgatatgttgatgaacatttaggttccttccaaatcttggctattgtgaacaatgctgcaacaaacatggaggtgatagctgacatactgatttcctttcttttgggtatatacccagcagtgggattgctggatcgcatgatagctctatttttaggttttttttgaggaacctccaaactgttgtctataatggctatactaatttatattctcaccaacagtgtatgagggttccctttcctccacatcctcaccagcatttgttattgcctgtcttttggagataagccattttaactggagtgaaatgatatctcactgtagttttgatttgcatttctctgatgatcaatgatgttgagcacatttttatatgcctgtttgccatttgcatggcttctttggagaaatgactattcaaatcttttgcccatttttaaatcagattattaaatttttcctacagagaggtttgagctccttatatattctcgttattaatctcttgtcagatgagtagtttgcaaatatttttttcccattctgtgggttgtctcttgattttgttgattgtttccttggctgtgcagaagctttttaacttgatgtgatcccatttgtccatttttgtttggttgcctatgcttgtggggtattactcaagaattttttgcccagaccaatgtcctggagagtttcctcagtgttttcctgtagtaatttcatagtttgaggtcttaagatcaagtctttaatccattttaatttgatttttgtatatgatgagtcgtaggggtctagttttatttttctgtatatggatatccagttttcccagcaccatttatttaagagactgtccttgctccaatgtatattcttggcacctttgtcaaaaatgagttaactgtaggtgtatagatttgtttctggcttctttattctgttcaattggtctatgtgtctgtttttatgccagtaccatgctgttttgattactatagctttgtaatataatttgaagtcaggtaatgtgatttttccagtttcattctttttgctcaggatagctttggtgagtctgggtctttgtggttccatataaattttagcgttgttttttctattcctgtgaagaatgtcattggtattttgatagggattgtatttaatctgtagaccgccttgggtagaatggacattttaacaataatgattcttccaatacatgaatatggaatatatttctatttttaagtgtcctcttccattcctttcatcagtgttttatagtttttattgtagagatctttcacatctttggttaactcctgggcatttaattttatttgtggctattgtaaatgggattccatttttgattctttttcagattgttcactgttggcatatagaaatgctacaaatttttctatgttgattttgtaacctgtaactttactgaatttgtttattagttctaatagttttttggtggagtctttaggtttttttttaaatataagatcatatcatctacatacaaggataatttgacttctttctttccaatttggaggccctttatctttctcttgtttaatttttccatttaggacttccagtactttccattgttgaaagtggacatacttgtgctccagatcttagagaaaggcttccagtttttccccatgcagtatgatactagctgtgagtctgtcatatatggcttttattatgttgaggtatgttccttctatttccagtttttggagggtttttatcatgaagagatgttgaattctatctaatgctttctcagcatcgattgaaatgatcacatggtttttgtctttcattctgttgatatgatgtgttatatcacattgattggtttgcgtatgtttgaccattcttgcatccctgggataaatcttacttcatcatgatgaatgaataatctttttagtgtattgctgaattagcttgctcatattttgttgaggatttttgcaaaaatattctttagaggtattggcctgtagttttctttttttgatgtgtctttgtctggttttggtatcaggatgatactggccttgtagaatgagtttggaagtatttccctctcctctattttttcagttcattttgagcaggattggtattatttcttctttaaatgtttgctagaattcagcagagaagctattaggttctgggcttctctttgctgggagaccttttaattacggctttgatctcattatttgttattggtctgttcaggttttggatttcctcatggttcaatcttggtaggtaggttgtatgtgtctaggaatttatccatttcctctagactttccaatgtgttggcatacagttgctcatagtagccactaatgatccgttgaatttctgtgatatcagttgtaatgcctcctttttcatctctgattttatttattttgtcttctttctttttatcttttagtctggataatgatttgccgattttatattttcaaaaaaccaactttttgttctgtcaattttttgtatttttcgttcattttaaattcattcatttctgctctgatttttttttttttttttttttttttttttttttttttagatagaatctggctgtgtcactcaggaggcacagaggtgtgattttggctcagtgcaacctccacctcctgggttcaagctattctcctgcctcagcctcttgtgtagctgggattacaagtgcacgtcaccatacccagctaatttttgtatttttagtagagactgggtttcaccatgttggccaggctggtcttgaactcctagctgggattacaggtgtgagccaccaagcccggcccatacattacattttaaaaaaactgcatctgaatttctgctctatactctacattttatttgaatgtcctctgatcaaaaagttaccagatttattaaaaataccttaaaaattatatctttttacactatcttcctcagaatttggcagattaaaacaaacattcacaaattattgagagtaaactgtttctcaacaattgaaatgtgtagtccttgtagctacacattttgactatgtccttcatatgatttaaatttcctttgcacaatttcttagaggtttgagaatttctcaatagaataaaagaaaagcacaagtcctctacccattgaaaaaattttttgagaaatgctatcaggttgatagactttatgaattcaaaaatttggaaaacttttctatatgtctaagcagcaatttagtttttcatacatgtgtgtatgtgtgtgtgtatacacatatatatgttaccttctggacacagcattcaaacaataatttctaggagagaattgtaggtaagagctaaaggatgtgtactcaggaagccagtaatggcgtgtggtgcctgggttccaagctagcctttttttttttttttttaatgatatgatcttattttattttatttttttatttttatttttttaattttcttattttattttattattattatactttaagttttagggtacatgtgcataatgtgcaggttagttacatatgtatacatgtgccatgctggtgtgctgcacccattaactcgtcatttagcattaggtatatctcctaatgctatccctcccccctacccccaccccacaacagtccccagagtgtgatgtttcccttcctgtgtccatgtgttctcattgttcaattcccacctatgagtgagaacatgcggtgtttggttttttgttcttgcaatagtttactgagaatgatgatttccaatttcttccatgtccctacaaaggacatgaactcatcattttttatggctgcatagtattccatggtgtatatgtgtcacattttcttaatccagtctatcattgttggacatttgggttggttccaagtctttgctattctgaatagtgccgcaataaacatacgtgtgcatgtgtctttatggtagcatgaattatagtcctttgggtatatacccagtaatgggatggctgggtcaaatggtatttctaggttgccttttttgaaaaaacgtagtgttgcccatacatatgcaaatgataataaaccaataatgtattaactgtaatctactagaaagatttcaccagcaataaatgtttgctgtagataccttttgggggtagatgcctttaagatgtcaaaaagagtcacattttatctttgattaaagtgtttcatagagtaatatgccatgagagtggctagaagaggactattacacatagtgtgtttgagtaaagaaaacatgatctactgataataaaatgttagaaaatagactatcatgatttcaagttatacagttgcactgcctctgacctgaagatgagcagctgtaaagggatctgatttgagagaggaagggactaagagagcttctgttgcctcccatttcacttctgcacctgccagaccctgataccttaaatggggaatggggagatttgcagagtactacagatactgagtactgtctatcagcagagtttgatacacttaatggaaattctacctattaagtgattattcattcatctattagataaatgagaatgctttgcaggaggtaggcacctagtaagtgccagatggcaacttaagtttcaatacagtcatgcggagcttaacaactgggacacattctgagaaacgcatcactagattttgtcattgtgcaaagatcgtagcatgtacttccacagacctagaaggtatatatattattatttatatatattcttcacatggaaaactaaatgccctatcaccattattgaatatcaatcttttcccccacttaatgtgcagtgccagtatcttgtgccaggtatcaggtttctatatgtgctccattataatcttatggtatcaccatcatacatgtggttcatcattgaccaaaacatggttatgtggcacatgactgtattttggaaggatggagacttttgatattcagcatctactgctattctcttcacatgctctattttttgcattgatagctaaaaactacagtatccaggctcccttgcagctaggagtttagatgtagtctctgcccttgaggcagttacatgacatttgaaaatagaagaaagtgaggcacagtggctaggctgggcacggtggctcacgcctataatcctaacactttgggaggctgaagtaggcagatcacttgaacttaggagtctgagaccagccttggcaacatagtgagaccttgtcaaaaaagaaatagagagagagagagagagagagagagagagagaaagaaagaaagaaagaaagaaagaaagaaagaaagaaagaagaaagaaagaaaaacagagagagaaagagagagagaggggagggagggagggacgaaggaaggaaaagaaagcggaagagaggtggaggccattgtattcctgtggaggtgcaggagcacatgtaggctccaatagatgtgagtgtgggcagtgctgggcaacattgcctattctactgccacagtggcttcctgacctctggaccccagaagtggcaatgtatcaccttgaagccaaaagcctagtcctagtgaccaatttttgctcctttcaaaaccatctttcaatggttttgtaagcatctaactttctctactaagttccttcctgattaaaatagctttttcctgcactaaaccctgacaggtactaattggtgtaaggtgagggattctacccctttgtctttctgcatactgcaataggccacgtaatcaatggatcagtcctactgttgcaaattcaatcagtcttaactgtactgcagcatatcctgatgagctcaaagatgtcataccccaccattttagttcactcaggctgccatcacaaaatatcataaactgggtcgcttatagataacagaaattttatttctcacagttctgaaactgggaagtccaagattaaggcaacagcagatttggtgtctggttgagggccaccttcctaatggagggaaacttctcactatgtcctcacaaggtggaagtaaggggtctcaggcctattttataaggacacaaatctcattcatgagggttcaacttttgtaatataatcacctcctaaaggctttgaccacctagtaccattgccttagggattaggatttcaacatttggatttggtgagggatgcaaatattcagaacacaggacacaccatctccaaagcctaactcattggtagactatggctgctcagttttctctaaggttaaaaagagttttattttggccagagcaattaggcaagagatagaaataaagggcttccaaatggcaaaggaagaagtcaactcagtctggttcacagatgacataattttattttcatttttattttttattttttgagacagggtctccctctctgtctcacccaggctggagtacagtggtgtaactgcacaccagcctcaaccttccaggctcaagcaatcctcctgcctcagcctcctgagtagttgggactacaggcccacaccattatgtctggctaatttttgtatttttcatagagatgggattttgccttgttgcccaggctggtctcgaactcctgggttcaagtgatccacccactttggcctcccaaagtactaggattataggcatgagccaccatgcctagccaatataatcttatacttagaaaaacctaaagacttcacctaaacattgttagaaataacaaagtcagtacaattgtgggatacaaaatcaacatacaaaaatcagtagcacttacataagctactgtaagtgggcagtaacaatctgaaaaacaaatcaaaaaagcaatctcatttacaatggctacaaagaatataaaatatctaggaaccaatatatccatagaagttaaagatatatatataaggaaaactataaagtactgattaaagaaattgaagaggacacaaagagtggaaagatgttccaggctcatgaattgaaatcattaatattatgaaaatgataatcttactccaaacaatttatagatccaatgcaatctcaatcaaaataccaatgacattcttcacagaaatagaaacaaaatcctaaaatttacatgaaaccacaaaagaccttacataggcaaagcagtcgtgagcaaaataaaccaaagctaggccaggtgtgatggcttgaacctgtaatctcagcacttcggcaggccaaggcaggaggaatatttcagcccagaaggttgaggctgccgtgagccatgatagcaccactgcactccagccagagtgacagagaaagaacctgcctctaaattttttttttaattaaagagaacaaagctggaggcatcacattacctgacttcaaaatgtactacaaagctatagtaaccaaatcagcatagtactggcataaaaacaaacacatacaccagtggaataaaatagggaacccagatataaatccacacatttacagccaactcatttttgacaaaggcaccaagaacataccttaggtaaaggacagtctcttcaataaatggtgctgggaaaactggataaccatatgcagaagaatgaaactagacccctatttcttaccgtatacaacagaactaaccaaaatagattaaagacttaaatctaagacatgaaactactggaagaaaacattggggaaactctccaagatattggtctgggcaaagatttttgtgtaagacctcaagaacacaggcaaccaaagcaacaatagacaaatgagattatatcaagctgaaaagcttctgcacagcaaaagaaacaagcaacagagcaaagagacaacccacagaatgggagaaaatatttacggctatccacctaacaagaaattaataaccagaatatataaggagctcaaacaactcaatggtaaaaaaaaaaaaaaattaaattaaattaaatttaaaaacccacacaaatgattcaattgttttaatgggcaagcaatctgaatagacatttctcaaaaaaaaatacatacatatagccaacaggtatataaaaaaatgttcaacatcactcattatcagagaaatgcaaatcaaaaccacaatgaattatcacaagtcagttaaaatggcttttattaaaaagacagggaatatcagactctgttgagaatgtggagaaagaggaacactcatacactggtggtgagaatgtaaattagtacggctattatggaaaactatatagaggtttctcaaataactaaaaactgctatatgatccagcaatttcactactgggtatatatacaaaagaagcaaaatcaatatgtcaaagggatatctgcactttcatgtttactggagcactattcacaataaccaaactatggaatcaacctaagtacccatcattgggcgaaaggataaagaaaatgtggtatatatacacaatggaatattgttaatctataaaacagaatgacatcctgtcatttgtaggaacttggatggaactagaggttactatgttaagcaaaataagccaagcacagaaaggcaaatatcacatgttctcattcttatgtgggagcttaaaaagtggatctcatgaagatgaaaataaatttgtcattaccagaggccaggaagggtgaggggaatgaagaaagctgggttaatgggtacaaatatacagtctgatagaagaaataggatctagtgtttgctagatcagtagagtgactatatttgtaaactatagcttacaatagtttattgcatatttcaaaatagctagaaaacaataatgcaagtgtttctagcataaataaaagacaaatatttaaggtaatggatatctcaattacactgatttgatctttacaaataatataaatgtattaaattatcacatatgccccaaatgtacatttttaaaaattaaaaattaagagaaaagtttaattttcaaaaacaaaaatattactgacacaattatgtataagaatgcatcaacaggcagttcaaaaaagtggaaatagaaatggtcaataaacatatgcaaaaacacagcctcattaaaaatggcaaaatgcaaatttttattaaaatgaagtaacacttattagatatatcggcaagaaaaaaaaaatcaagtttgggccaaatgcagtggcttatgtctgtaatcccaacactttaggaggctgaggtgggcagattgcttgagctgaggagtttgagaccagcctgggcaacacggcaaaaccccatctctgcaaaaaaatacaaaaattagctggacatagtggtgcatacctgtagtcccggctccttggaaagctgaggtgggaagatcacttgaacctggaagattgaggctgcagtgagcagtgatcgcaccactgcactccagcctgggtgacagagcaagaccctgtgtcaaataaataaataaataatcaagtttgatattatcaaatactggcaagaccatggataaaatagatatttcatgctctgctggtgggaatatatattggtgcagtaacctgtaagcggaatttgacagattctactgaaatgtttaaaatgcacactcaatgactgcattttaacctccatgcacacaaggaaaaatgtacaagcatattcattggaccattgtttaaaataggaagagatgttaagcttaaaatgtccatcaataaatgaccacctaaataaaccaggtccaactttgaaaaactaggcagctattaataaggatgagatggagccatgtattcttatctgggaagatctccaaattccattggtaggtgtaaaaagcaagttgcagaaggattcatcaggcatgccattttcttaaaagcatattttctactatatatatttaataagcacatatttatccattgaagtacattagaagtggcctgaaagaatacacactaagcaataattaccactggagaatacaggaagggtagcaacatgctgtgagcctcatttcttacattttacaaaattgaaaagccagttaagtagaggtcggataagagagtttctgtttgcatagcctatgccagaggttttcaaatgctaaatatggtcctaaaattattcaggaagataaagataaagatacagattttagaccaccacctccaggaactttgacttatgtacatataaagcaaagcctaggaatgaaatgtttaaaaagcttccctggtaagtataaagtgattggagccatgctgaaggtcactgttcccagcccagctaaaattaattcaacacatagaagagcagagaagcaaggataagacattggctatatgtgcgtgccttctactagggtagaaatacccagtgctattgctagaaagcacagacttgacttaccaattactaataaagccattctcacagggttaataagaattttggacagaaatatagctataattaagcattaatcatgctatattttgacccacttctttgtaaccaaaagtcacatagcactagatactcacaatttgcaaccctgtttttcctatagataggatttctgacattagattcataagacttgtttaagaattgcttaagcagactctgaattccagtggaatggctgatgccaaccagtttgaagacccccacagcagaactgaatcagcatgaaaacacattttttcatcttcctgggccatgatttcaccctgcactcttcgaccaatcaatatctccacacttcagccaactccaaaacccttaacaatcctagccccaaatttctcagggagatggattttaggtttactctcatttcctcattcagcaacccttcgcttaaacctctttctctgctgcaatccaatatatcagcacgttgacttgctgtgcacattgggtaatgggcatattacagttacacacacttattggtgcctgagaaattaacagagaatggggtagagcaagacggctgatagaggcttatactgttcatcctccacatagcaacaccaaattttaactactaactacacacaacaagcaccatcataagaaccaaaaatcaggtgagcaatcatagtacctgattttaactttatatcactgaaagagacattgaagagggcaggaaagacagcattgaagcactgacgccacccctccttcatcccccagcagcggccatgtagcacagagaatctgggtgcttgggagagggaaagtgcagcaattgtgaggcttttcattgaacccagtgctcccctgttacagtggaaagcagaaccaggttctactcagctgatgttcatttggcccagctctagccagagagaaattgtccatcccactggtgggagcttgagttccagcaagcctcattaccgtgggctggagtgctctggggcactaagtgaacttaagggtcagtctaggtcacaaggagtgcaattcctaggcaagtcctagtgctgagctgggctcagagccagtggactgggcaggcatgaaacctactgagacaccagccggggtggcttgggagggtgcttttgtcacccttccctcaccccccagcagtggccatgtggtgcagagaaatctttgtgcttgggagagggagagcacagcaaccgggggactttacattgaacttagtgctgccgtctcacagtggagacctggcaggattcatctcctgctgacaaaagagcccctaggccctgaataaccaccagcaatacccaggtaatacactatgggccttgggctctgagacatgctggcttcaagtgtgacccagcacattcccagctgtggtggctacagcgaaagatctttctgtttgagaaaaacaggggggaaagtaaaggggactccgtcttgcacttcaggtaccagctcagccacagtggggtggagcaataagcagactcttcaggtccccacgtccaagcctaggctcttggttagcatttctggacctgccatggaccagaaggaagcccactactctgaagagtgagtgtcaggtctggcagcactcatcacaagctgacaaaagggcccttgggctttaagtgaacatcagcggtagcctggcagaacccctcgtggggtgcttatggtggtggccacagggagagaaaagtgggaaggactttgtcttatggtttgagtgccagctttgctgcagtagagtagaatacccggtaaatttctaaggtatttgacttaaatccctggctctcagacaacatctctggaccaacctaggtctggaggaactcactgccctgaatggagggacataaatcagactggctttgccatatgctgatcataaagccctaggtcctagagtgaacttaggtggtagccagatagtagttacagcaggccttgggtggggcccagtgctgtgctggtttcatgtctcagccagcacagtcctggtggtggtggctacagggtacttgtgtccctccacctccagttccaggagactcagcacagagtcagggagagacgctgcttgtgaaaaaataagagaaaaaaataaaagtgtctgcctggtaatctagagaattcttccagatcttatccaagactaccagagcagcacctctatgagtctgcaagaaacataatattattggacttggggcccaagttccttcaaaatacccggaaagcctttccaaggaggatgggcacaaataagcccagactgtgaagactacaataagcgcctaactcttcaatgcccagacattaacgaacatctacaagcatcaagaccatccaggagaaaatgacctcaccaaacaaaataaataaggaaccagggaccaatcctggagaaacagatatgtgacctttcagacagagaattcaaagtagctgtgtcgaggaaactcaaagaaatccaagaaacacaaaacagaaattcagaattcttttttttttttcttgagatgaacgcccaggctggagtgtagtggtacgatcttggctcactgcaacctctgcctcctgggttcaagtgatcttcccacctcagcctcctaagtagctggaattacaggtatgtgccaccacacccaactaatttttatgtttttagtagacatggagttttgccattttggctaggctggtcttgaactcctgacctcaagtgatcagcctcccaaagtgctgcgattacaggtgtgagccactgcgcctggccaggaattcagaattctatcagacaaatttaacaaagagattgaagttattaaaaagaaatgaaattctagtgctgaaaagtacaactgccatgctgaagaatgcatctgggtctcttaataacagacgtgatcaagcagaagaaagaattaatgagcttgaagacaggctatttgaaaatccacagtcagaggagacaaaaagaaagagtaaaaaacaatgaagcatgtctacaagatatagaaaatagccttaaaagggcaaatctaagcactattggccaaaaagaggaggttgaggaagagatggggatagaaagtttattgaaagggataataacaaagaacttcccaaacccagagaaagatatcaatattcaagtacaagaaagttatagaacatcaggcagatttaatccaaaaaagacaacctcaaggcatttaataatcaaactcccaaaggtcaaagataaagaaaggatcttaaaaacagcaacagaaaagaaacaaataaaatataatagagctccaatacatctggcctcagacttttcagtggaaaccttataggccaggagaaactagcatgacatattttaaatgctgaagggaaaaaaaaaactttaaccctagaatagtatattcagcaaaatatatcttttaagcatgaaggggaaataaagaccttcccagacaaacaaaagctaagggattttcatcaacactagacctgtcctataagaaatgctaaaggaggccaagcgtggtggctcatgcgtgtaatcccagcagtttgtgaggctgaggcgggtggattgcttgaggccaggagttccagaccagcctgaccaacatggtcaggtgtctctactaaaaatacaaaaattagctgggtgtggtggcgcatgcctgtagacccaactacttgggaggctgaggcactataattgcttgaacatgggaggcagaggttgcagtgagctgagatcatgctactgcactccagcctgggcaaaagagtgagactccatctcaaaaaaaaaaaaagaaatgctaaagaaagttcttacatctgaaagaaaaggacattgatgagcaataggaagtcacgtgaagctacaaaactcactggtaatagcacacagaaagacatagaatattataacactttaattacggtgttcaaaatactcttaagcagaaagactaagcaatgaactaatcaaaaataataactacagcaatttgtcatgacagacagtacaataagacatgaagagaaacaacaaaaagttaaaaagcaggaggatgaagttaagagtttttattagttttctttttgcttatttgtttgtttatgcaatcagtgttaagttgtcatcagtttgaaacaatgggttatgaaacagtagttgcaagcctcatggtaaccccaaattgaaaaacatacaatgggccaggcacagtggctcacgcctgtaatcccagcactttggggggctgagacggacggatcgcttgatatgaggagttggagaccagcctggccaacatggtgaaaaccctgtctctactaaaaatacaaaaattagccaagtgtggtagtgggcacctgtagtcccagctactcgggaggctgaggcaggggaatcacttgaacctagaggcagagattgcagtgagccaagattgtgccactgcactccagcctgggtgaaagagtgagacttcatctcaaaaaatgacaacaacaacaaaaaactggactctttcatcattatataataaccttctttgtctctataggcggcagaaacaaagaaggtcattatataataatcaaggagtcagtttagcaagaagatataacaattatatatgcacccaacactggagcatccagatatatgaagcagcaaatattatttaaggtaaaaagacagccctcagtacaataatagctggagattttaacatcccactttcaccaatggacagatcttctagacagaaaatcaacaaggaaacatcaggcttaaactgcactatagaacaaatggacctaatagatatttacagagcatttcatctgaaggctgcagaatacacattcttctcctcagcacatggattattctcaagaatagaccatatgttaaatcacaaaacaaggctttaaaaaattcaaaaaaattgaaataacatcaggcatcttctctgaccacaatgtaacaaaacaagagatttggaagctataaaaatacacagcaattaaacaatatgcttctgaatgaccagtgggtcaatgaagaaattaagagggaaattgaaaaatttgttgaaacaaatgataatggaaacagaacataccaaaacctatggaatacagcaaaagcagtactaagagggaattttataattataggtatctacatttaaaaagaagaaaaactaatctaataatcataaataacctaatggtacgtgttaaagaactacaaaagcaagagcaaaccaaactcaaaattagcagaagaaaagaaataataaatatcagagcaggtggggtgtggtggctgacgtctataatcccagcactttgggaggctgaggcaggctcatcacttgaggtcaggagttcaagaccagcctggccaacactgtgaaaccccatctctactaaaatacaaaaattagctgggcatggtggcacgtgcctgcagtcccagctactccggaggcagagttgagagaatcgcttgaaaccaggaggttgcagtgagcctagatcatgccattgcactccagcctgggtgacagagtgagacttggtctcaaaaaaaaaaaaaaaaaaaaggatacatgaaggcctaagtggattttgagtttatctaatttattgttctctaataggcctagaatataaaataaagaaataggataatacttttttttgtattgcttctgaagtgatacaaatgaaattatatcttcctcagaccttctacaagctataaaaattcatagactatttgaaaataagccttgctactagtcttatcaaaaacttcaaaatgtttccacttctttgaagtgcaattggtggcatgaaaagaacccagaactagaagatgaagggcacaggtgggttttagccctggcttctttttttttttttcttttttgagacggagtttcacttttgttgcctaggctggagtgcacgatcttggctcactgcaacctccacctcctgggttcaagtgattctcctgcctcagcctcctgagtagctgggattacaggttcccaccaccacacccagctaatttttgtatttttggtagagacggggtttcaccatgttggccaggctggtctcgaactcctgacatcagatgatccgcctgtcttggcctcccaaggttctgggattacaggcgtgagccactgcagccggcctagcctagccctggcttcttttcttacaagttgtgtgtccttgggcatttatttaacttttctgatctgcagttttctttatctgtaaagtcaacagttgtaaagattaaatgagataacttttgaacagtgcttttcaaactagaaaacaccgcaaatatttgattataaggtaggtttgtccaagtcccaacagctgtgggaggactgaaaataaaagataaaatttttaaacttacaattgtatgtgctaaaggaagatggccaggatggtgaagtgtgcagtgaccttgtggttagaaatgtggttggaggaactaagactgttactctgaagcctgaacactggggttgcagagaggagaatcaatatttacagcctggcctggtgggaatcctactgtatgacttggcctttagcagtgtcagatttttaaaaatattcctgttttatttagaaatgagttatcacctcgccttgctcattttcctctcatctttacattcccttaatccaaaaaccaggaaggatgcaggcttaggtcttcagatgtctcaggctgatctctctgtgcttatagaatctttttaaggccacaggagaggtaggtgacatctggatgtagtctcaaaacaaagctcaacatgcatatcttggtggaaatctgaaggaaatggaacaggaggaaaatgaagacacaactttgaggcacatatggattggaagttgtctaatggaaggtctggatacctttcagaattctcagaggatatactttttaaggtataagtgactcatgacaggaggagtggagagctggtgaccaatttgaaaattgctcaggaatgcggattgatgtttggaacatcaatttccatagtttatatactttctactattcaatcaaattaagattgatgtttggaactccaatttccacagtttctattgcttctcttttctcataatagtctttctacctctttttatttaaccaaataagacacagtgagtttaatgaattttgggttttttttcccccagttgggaagatctgtcaatatttcataggcaagcaaaaagaggcactaaaagggacctattaaaatattttagtcacttctgaagatccaaagacaggttctttttttgcaaagctttattctctttttatgaattcctctttttgctgatttgtcttttatttctttccttttttttttttcttttgagacagagtttcactctgtctcccaggctggagtgcagtcgcatgatctcggctcactgcaaactccacttcccgggttcaagcggttctcctgcctctgcttcctgagtagctgggactacaggcacacaccaccatgcccagctaacttttgttttttttatagaaatgggatttcaccatgttggccaggctggtctccaatgcctgaccttaagtaatccacctgcctcggcctcccaaagcactgggattacaggcatgagccaccatgcccagcctgatttgtcttttgtgattactcaaagatcaagcagctcatactatgtacatcagttttacagacctggcaaggtagccctttggcttgccttcatagctgtgaacctgcaattaagtcatcaaaaattttcagcctgctgcctatttacaatgtaaacaagtgattgctagtatcaagctatttgtgaatacagaatttttttttcttttttcagagggagcgtcgctctgtcacccaggctggagtgcagtggcacaatctcggctcactgcaacctccgcctcctgcgttcaagtgattctcctgcctcagtctcctgagtagctgggactacaggcatgcaccaccacatccggctttttgtatttttagtagagacggggtttcaccatgtcagccaggctggtctcgaactcctgacctcaagcaatccacccaccttggcctcccaaagtgctgggattacaggcgtaagccaccgtgcctggcctgaatacagaatttttgaaacatttctttggctaaaacagcatttttaaataaggaaatttgcagagttgaggtttcattagagacatgaagatttaatttgagttgtaatttttgacatcattaagagtgaagcaaagtttttcagagatttgagctatttcattgtgttgacaggtgtaatgattagagcatcataatctacatggatgtggcttcactaagcagaaaatataacattttgtataattagaagtttgctgttttgagtacatcttcttccatctatttatactcacaagttcaccagggaaacactttccctccaaatgcagtggggtagatatgagttgctctacatacttgggtgtatgagttgtcacctcatctatatgttctaaaattacctctgattcttaacctcgactagccaaagcagtgagaaagtccatttcggatatgttttgggaaatttcccccttttgttagggtcacctaaaaatccaagttgaagactctacttccaggtataatttctatggtttattactggaaaagtttctctaaatatgtggatcgctggaaataagaggaagcacagggttctccgagtgaagctggcttttggaattacttggctgcaactgtcatttgctactttaagattttacttattgatttttttttttgagacagagtctcactctgttgcccagtctggagtgcagtggtgcgatctcagctcactgcaacctctgcctcccgggttcaagcgattctcctgccatagcctcctgagtagctgggactatagtcatgtgccaccacgcttggctaatttttgtattttagtagagacagggtttcagctgctctgcctatggagtagccattgttttattcatttaccttaataaacttgctttttttttttttttaaatgaaaaccgctctgttggccagggtggtcttgaacttctaaccttaagtattccacctgcctcagtctcttaaagtgctggaattacaggtatgagccactatgctcggcctgccattttctattgataattttcttcgcttccttggggagagtaaaagggagagaacacagtctgagtagttcctcttcaaaataagctgggcgcagtggctcacgcctgtaatcccagcaatttgggaggccaaggagggcagaacacctgaggtcaggaatttgagaccagcctggctaacatggtgaaaccccgtttctactaaaaattcaaaaaattagctgggcctggtggcgcttgcctgtaatcccatctactcaggaggctgaagcaggagaatcgcttgaacccaggatgtggaggttgcagtgagctaagatcatgccattgtagtccagcttgggcaacaagagcaaaactccatctcaaaataaataaataaatacagaaaatataatcgaagttgggaagggtcgttgtcctatccagccagtggggcggggcccagtcttaactggaagcattgggtttcattgcctcagtctgctctgctacaggactttgttactcagaccagccctccctgcccttgcacagggattctttcagcaggctgagggacactgttcccatggtatgtccgtaattggtgggttcttggtctcactgacttcaataatcaagctgcagaccctcatggtgactgttaacagttcttaaacatagtgtgactggagtttgttccttctgatgtttggacgtgttcggagtttcttccttctgctgggttcctggtcccactagcttcaggagtgaagctacagacattcgctgggagtgttacacctcttaaggcagcactggagttgttcattcctctcagtgggttcatgatctcactagcttcaggagtgaagctacataccttcaggtgagtgtcacagctcataaaggcagcaaggctccaaaaagtgagcagccacaagtcttattaggaagaacaaaagaacaaacctgccacaacatggtagacgacccaagcagattgccgctgctggctctggcaccctgcttttattcccttatctcactccacccacatcctgctgattcgcccattttacagagagctgattggtccattttacaaagagctgattggtctgttttatagagagctgattggtccgttttgacagggtgctgattggtgcgtttacaatccctgagctagacacagagtgctgattggtgtatttacaatcctctagctagacataaaagtgctccaagtccctactagattagctagacacagagcactgattggtgcatttataaaccttgagcttgacacagggtgctgattggtgcgtctacgaacccctgccccccaccaatgctagacacagagtgctgattggtgcatttacaatcctccagctagacataaaagttctccaagtccccactccactcaggaacccagctggctttgcctagtggattcccgccccaaggctgctggcagagctgcccaccagtgccccgccatgtgcccgcactcctcagccgttgggcatcgatggggccgggcgccgcggagcagggggtggggagggggcggggcggcggggctccggggctcgcgcatggcgggctgccagtcgccagccatgggagtcgggggagccgggggaggaaggcagctgaggcccgacgagaattcgagcgccgacccggtgggccagcactgctgagggacccggcgcaccctctgcagctgctggcccgggtgctaagcccctcactgactggtgcggtggcgccggccggccgctccaagtgcggggcccgccgagcccacgcccatccggaactcgcgctggccggcgagcacggggcacggccccggttcccgcccgcgcctctccctccacacctccctgcaagcagaagggttcctcaagcgcggccagagtggacaccgtggcttgaggaggtgccgagagcgaggcagggctactagcatgttgtcacctctcaatgggtctctccactgaccactgcctcagcccacggacactctcgctgtggttcccaaggtatctgtgtccccggcctagctctctggcttcctgaagccatctcttactggtgctccatgcatgcaaaccttgggcctcttatcactctcagaggctccttcttcttgtctttctctagtcttggagaaatatctcttaagtttcagcatcagcttcttctctttcccctttatagacttctatctcacccacctgcaaaagaataaacagtgtgaggggccgaaatgtcactccttacaccacacctcctaaacagagaagacaaaacataaatgagtgtctcccgtaattgcccctcacaccagtattattttgcatcgtgtcttttttgtcagaatctatgaggtttttgtttgtttaagttctctctctgtcacgcaggctggagtacagtggcacaatcatggcttactgcaggttccaccccctggtctcaagcaacccttctgcctcagcctcccaagtagctgggactataggtatgcaccaccacacttggctaatgtttaattttttttgtagagacagcatctcaatgtgttgccaaggctagtcttgaactcctgagctcaagtgatcctcctgccttagcctcccagggtgcttttcctactagataccctacataccttcttgctagatcaaaagcagacaagaatctgcttttgatctagctggaaggtatgtagggtatctagtaggaaaaaagctggcttcagagctgtgagtcctgccaggggctgggaaaaggtggaaaggggagaaactgcttagtgggtaaggaattttactttggcgagatgaaaatgtttctggaattcgatagaggtgatggttgtacaatattgcgaatatactcaatgctatggaattgtttacttttaagtatttatgttatctgaattttacctcaataacttattaaaaaagaaaaaagcaatgagtcctcatgctggtgccatggggcttattggtacgagagtacactgggctaaaaagagaacccacccgtctcccgcagttggaagctaaatgaccttggtcaatttccctaaccccagttttctcatatgtaagctggggataataattctcagttggcaaggatgctgttagggcaaaattaggtcatttgtgagaagcaccaggcacagtgtctggcccattgagggggtcacttcttcatagcacccaatctctgcttcttaggcagatgatctaggttctgccaatgcctcatgtttgacctgttggctttggggaatgagtggaaatgtcatcagctgaggttgaaagagaaagaggttctcattaggtaagaacactggtttgggacatgctgaatttgagacgattgtgagacataataggtcggaagctggagtctgaggctggcagagatggcagtcagactggacattgagatttcagtcatccagtatgtaggcagccactaggaccctgaaaaaggacttggcccaggggagattggagtgaacaggtagagggcttgaggtgaaagactgggaaatatcatttaagggttaggtgaatcctgtactcatgaaggttattcaaccctatctgtccacaggcttaccttgtacacctctctgtctctgctcactccattctaacttactctgttcattcatctttccagatttctatctacagagcttttccagtcttgatgtctgcttggtttgtttctctgcctcttgactcagtgcttcattctctggctagagcacaaatttacccatcctggttccccaagttcctttcatccagcgtggcatcaaggaagtctgttcatgataaccaggtccagtgtgctctcataattgatctccaaagagcagtgctttctagattaattctcagctgggtcttgtctcttcacacttcactttttttttgagatggagtctcactctgtcacccaggatgcagtgcagtggcgcaatcttggctcatggcaatctccgcctcccgagttcaggcaattctcctacctcagcttcccaagtagctgagattacaagcacgtgccaccatgtcttgctaatttttgtatttttagtagaaatggggtttcaccatgttagccaggttggccacaaactcctggcctcaagtgatctgcctgcctcagcctcccaaagtgttgggattacaggtgtgagccaagatgtccagactctttacacttcatttctaacatgccaggtcctaccctcttccttgcttaccttggcacctggatttccctgattttgaactgattatttggctcttgattcctggccttactttgtctttgtggatatttgtttgttctgtctgttttaattcagcaaatatttattgagggcctactatgtgccaggccttattttagggtctaggaatacagcagaaacaaaacagaacaaaatccctatgtttgtggaaagtagatggggaaaaaaaaagcgggaaagtgggataaggagtgttgaggagtgagttacaagtttaactagggtggtcagggcatcctcccactgagaagttatcattcaggacagaggaaagagccagtcaaaggccttgaggcaggagcatacctggagtgtttgggagcatcaaggaggccaggatggctacagcagagaaagtgctaaggagggttgtcaaggagagatcagcacagtacaggtggtgatgaggacattgtttagggtcctacaagccactgtaagaaaatcagcatttcctatgagtgatggggagcctctggagcattttggggatcagtctggctttgtggagacccagtcatccagcttcctacagtccacttccaggcttgcctccacactttttttttgtttgttgttcggttttaattcatgtcattgtacccagagaaaatgtttcagctggaccctgcttcagttctacttctaataactatgcctcaattcacgtgtcacttggaaagtaaatgaagatggtattactgattcaatcatccgtcaaatagacatataattataaacttagaaaagtgctatcaagaaaaattgcatgagggcataccaaggaatgccaagaattgctggcaactaccggaagctgggagagttcaggaatgattcttccctagagcctttggagagagtgtggccctgctaacaccttgacttctagctccagaactatgagacaacaaatttctgtggttttaagtccctccacacccacacccagaagtacatgatgtttggcagtgcatcatggggaaagagactgggtaaacaaggcagagtccccttgagaaagtaccttgaaaaaaaagattttactgtttttttaagagacagggtctcataccatcacccaggctggagtgcagtgccatgatcatagctcactgtagcctcaactcccgggttcaagtgatcctcccacctcagcctcttgattagctggtaacccaggtgtgtgccaccacacccagctaatttattaaaaacaaggtttgaaggatgagtaggagttaggtaagtgtgaatgggggcagagggatatgtttttgcatgtagaccagtatctacaaaggccctagagcagagaaaagtgaggccaattccattaaaggaagaaaggctagtgtgaggttgaagcaccaggttgggaagagaggcaagaattgagcatggggaggtgacaccatgtaaacagttgtgtttttagcatttggcagtgaatcttttagcgttaaatctgtgaatatgtttcctgactgtgaccgtaaattttttgtgtcaacttgactgggccatggggtgctcagctatttggtccaacttgattctgggtatgtctgtgagggtgtttctggatgtgattaacatttgaattggtagagttagtaaagcagttaccctcctccaatgtgagtgggcctcctccaatccagtggaggcctgaagagaataaaaggctgagtaagaaaggatgctctctctctctgcctgtctttgggccaggacattggttgtttcctgcccttgacctcaggctcaggctggatgtataccatcagctctcctggatttggacttctcagcctccataactgtgtgaatcaattccttataataaactaatttctctatctctgtttttctacatctctgtatccatacgtcctactgattctgtctctctggagagccctgattaatcctgaccaattgacataagcaaacagagagattatcaatcaaactgtgtctggaattggtgggttcttggtctcactgacttaaagaatgaagccgcggaccctcgcggtgagtgttacagctcttaaggtggcgcatctggagtttgtttcttctgatgttaagatgtgtttggagtttcttccttctggtgggttcatggtctcgctggctcaggagtgaagctgcagaccttcgcggtgagtgttacagctcttaaggcagcgcgtctggagttgttcgttcctcccggtgggcttgtggtctctctggcttcaggagtgaagctgcagatcttcgcggtgagtgttacagctcataaaggcagtgtggacccaaagagtgagcagtagcaagatttatttcaaagagcgaaagaacaaagcttccacagtgtggaaggggacccgagccagttgccattgctggctcgggcagcctgcttttattctcttatctggccccacccacatcctgctgattggtagagccgggtggtctgttttgagagggtgctgattggtgctaggtttacaatccctgagctagatacaaaggttctccatctccccatcagattagttagatacagagtatcgacacaaaggttctccaaggccccaccagagcagctagatacagagtgtcgattggtgcactcacaaaccttgagctaaacacagggtgctgattggtgtgtttacaaaccttgagctagatacagagtgccaattggtgtatttacaatctctgagctagacataaaggttctccaaggccccaccagagcagctagatacagagtgtcgattggtgcactcacaaaccctgagctagacacagggtgctgattggtgtgtttacaatccctgagctagacataaagactctccacgtccccaccagactcaggagcccagctggcttcacccagtggatcctgcaccaggccgcaggtggagctgcctgccagtcctgcgccatgcgctcgcactcctcagcccttgggcggtcgatgggactgggcgcagtggagcaaggggcaacgctcgtcggggaggcttgggccacacaggagcccacggagggggtgggaggctcaggcctggcgggctgcaggtcccgagccctgccccgagggaaggcaactaaggcccagtgagaaatcgagtgcaacgccagtgggctggcactgctgtgggacccagtataccctccacagccactggcccaggtgctaagcccctcactgcctggggccggcagggccggccggctgctccgagtgcggggccgccaagcccacacccacccggaactccagctggcccgcaagcgccgcgcacagccccggttcccgctcgcgcctctccctccacacctccctgcaagctgagggagccggctctggccttggccagcccagaaaggggctcccacagtgcagcggtgggctgaagggctcctcaagtgccgccaaagtgggagcccaggcagaggaggtgccgagagcaagtgaggactctgaggactgccagcacgctgtcacctctcaaaaccatatcggtatctacgttcagagcctacattcaggctcttcctttatccagacagcacctagatatttctttggggaacctacttctccctgcctagggaatttgtagtagtcaagtgctttgagtagtgttgtgttagtcaattttgcattgctgaaaaagaatacctgagattgggtaatttataaaggaaagaggtgtatttggctcatagttctacaggctgtacaggcatggcaccagcagctgctcagcttctggtgtggccttaggatgttttacttgtggcagaaggctgatggggagcaggtgtgtcacatagcaagaaagggaacaagagagagaggaggaggtaccagtttccttaaacaaccagctctcatgtgaactaatagagtgaaaactcattcattacctcagggcaggcaccaagccattcatgagggatccacccctgtgacccaaacacctcccaccagactccacccgcaacactagggatcacatttcaacatgagacttggagagaacaattatccaaaccatatcaagtgtgggctatgcctgtagccataagcataggctttgattgttggaagtcaatcaatattttctggaggcttcatagtggtccctagtaatgtcatctcttttctaactagattctgaacaatcagttgagagataaaccagagtaatatcaaggtcccaaacagcacttttattgccatacagcaatttgaaccagctagaacacatggttcaaatctgttaaacaagtggactcaactccaaataatgcagacctaggcacccagtcataggccgtgatggactttgataggtcctgctacatggattaacagaagagaactcctcttctctgagggaagttccccaaatggaatggcagttctgcctttccaaaagaaaactgtgtagagcattctcagttaagttttacaaaattatcaatcagatgggttgatatatcttgccagagccagagaggctagagttacactaattgagacaacattaggcatgagaaagaagcattcttcataaaatatgctagttcatccttcttgccacagtgattggttcaaagataagtagtaactcaggtctaagcccatagaaattccctatcctggctgggcacagtatctcatacctgtaatcctagcactttgggaggccaaggcaggagaaacacttgagcccaggagttcaagaccagcctgggcaacatagtgagacaatctctaccaaaaattttaaaattatctggacatggtggcacccgcctgtagtcccagctactcaggaggctgaggaggaaggatcacttgagccagggaggccaaggctatagtgagctgtgattgcaccactgtagtctagcctgggtgatagagtgagaccttgtcaagagaaaggaaggaaggaaggaaggggggagggagggaaaagaaaaaggggggggaggaaggaaggaaggggggagggagggaaaagaaaaaggggggggaggaaggaagggggaggaagggagggagggagggagggagccgggcatggtggctcacacttgtaatcccagcactttgggaggccaaggtgggcggatcacctgaggttgggagtccgagaccagcctgaccaacagggagaaactctgtctctactaaaagtacaaaattagccaggcgtggtggtgcatgcctgtaatcccagctttttgggaggctgaggcagaagaatcgcctgaacctgggaggcggaggttgtggtgagccgagatcacgccattgcactccagcctgggcaacaagagtgaaactccgtcaagaagaaagaaagaaagacagggagagagagagagagagagagagagagagggaaggaagggagggagggagggaggagggagggaggaaggaattccctagcctcagagattggtccagattgccccaatcagaatgaagtgccagtgtttgatactagaaaggggcctttggagggaagacttcttgttgttaaacactttgcttccatgaggtaagttagcctgaggaggaagctgacttgtggaggagagcagagctgtgaaaaaaagggaaatactgagttggagtcctgatcaaaacatgcctgacatgttccttgggttttttttagttacatgagccaataaatgttctttaccatttaagccagcttaaattaggttttcttttactgtaaccagaattcttctaaaagatacacttatacctcatctattttaaaaccagactcaaatctcatcacctctaagaatgtttccataatcaatcctatgtacctttatattacacttgcctggggctgagagttctgggttacctagtgtatactgtaatttttttgcactattatcacttattagtgttttcatggtatatattttctcttttttctttcagtctgtgtccttagagtttcttgtgaacagcatatagttgagtcttgtttttgttaaaatttagtttgacagtttccactgtgatgttattctatttacattaaatttgctatagatatgattggtttaatgggccctatatgttctttgttattcctttgttgcttgtttacaaattaagttaaggagaaggagaggaggaggaggaagaggaagaggaagaagaagaagaaggaggaggcggtggcagctgggcatggtggcttatgcctgtaatcccagcactttgggaggctgaggttgaaggattgtttgaggccaagagttcgctaccagcctggtcaatacagcaagaccctgtctctattaaaaaaaaaaaaaaaaaaaagttggctgggtgcagtggctcacacctgtaatcccagcactttgggaggtggaggcgggcagatcacgaggtcaggagattgagaccatcctggctaacacagtgaaacgctgtctctactaaaaattacaaaaaataatattagctgggtatggtggcaggcgcctgtagtcccagctactcgggaggctgaggcaggagaatggcatgaacccaggtggtggagcttgcagtgagccaagatcactccaccgcactccagcttgggcaacagtgtgagactgtatctcaaaaaaaaaaaaaggtaaaaaaaagtaaaaattaagaattattcactattctcaatatatcagtattatatattatatgttacataaggattattcagtattcatgtatatgtgtgtgtatatatatatatatgtatgtattagagatggggtttcactttgttgcccaggctagtctcaaacccctggtttcaagtgatctgcctacctcagcctcccaaagtgctgaaagtataggcatgagccactgtgcccagccagtattctattttatcttacctattgtttttctagtaatatctcttggtatttttttagtggttactaaagattacaatatgtgttcttaccttttccttattttatcatttcataaacaatgtaagaaacttactacagtataattttattacccttctgcccttgtgcaaatgtcatgtattttttcattatcgattattttgctattctatttgctttaaatggtcaatagtctcctaaagaaagtttctaaagagtactttatgttttttcacatctttgcccattctggtggcgttcacagattcctggagaaaaacttcgttgagtgttactcataatgctggtctgcaagtgacaatttttttctgtttctgtttttatttagctttcatttttaaagggtgcttttgaaggtatagatttctaggttgacaggttttgtttgtttgtttgttttccagatgtcgttccatcattttctgtcttccgttttttttctcttaagaagttaaccaacattcttatttttctattcataagcataatagatcctttcccctgccctggcttcttttaaaatatctctaggtatagttttttttttttaaatctagcttagtgttcactgtgattattggatatatgggttcatatctttcatcaattttagaaaactcttggccactatcttttaaaatatttattttgccccagtttctcctctgttcctggattccaattacctgtatgctagatatatggtttgaatgtgtcctccagagttcacgtattgaaaacttaatccttggctgggcacagtggctaatgcctgtaataccagcactttaggaggccaaggtggatggatcacaaggtcagaaatttgagactagactggccaacatagtgaaaccccatctctactaaaaatacaaaaattagctaggtgtggtggtgcatgcctgtagtcccaactactcaggaggatgaggcaggagaaccgcttggacctgggaggcggaggttgcagtgagccgagactgtgtcattgcactccatcctcagtgacagagtgagactctgtctcaaaaagaaaaaaagaaaatagaaaacttaatccccaatgcaacaatgttgagaggtagaatatttacaaggtgattaagtcgcaagggctctgcccttgtgaatggactaatataatcatgagagtgggtttattatagtgagcattagtttatgaggaaatcaattttagctctctcactctctgtcattctcatgcatatacctgctctcttgccctttcaccttctgtcatgaaataacgcagcaagaaggtcctcaactcatgcaggcctttcaaccttggacttcccagacttcagaaatgtaagaaataaatctctgttatttatacattatgcagtcatgggtactctgttatagcagcataaaacagactaaaagacaactcagttgcctaatatttacttttagtctctgattctttgttccccatttttgttttcctcattcttttattctgttttcaatttgaataatttttactgacctatcttgcagttcacttattcttttttctgctatattgatttgttattaaacttatacaatcaatacttcattttagatattgttatttttttagttcattttcttattttagctgagattctcttatctcttgtttcactcatctttttatctaaattgtttaacatatttgtaatagttatttgaaaatttttgtctgctaattctaacactagggttacctgtgagtctgcttttattgagttttttttcttttcattatgggtcatatttcccccccttttttttacatattttgcatttcttgttttagacttccgtgtgtgtatgagtatttataaataatatttaccaccaccacccctgctccccactgcaccaagatgattccctttcctctatcaggaagctaggtttggttgggggtaatctcttcagtctaatcagaacttggggttgccacttttgttgatttcagttcaatccacttatggtattgtatgtcttaggcatgatccagtttcttttctctgatagggctttgaaattttagcatcatgagatccctatgctttccagcccagtcatcagtttcttgtttcacgagagtcaagcaggtaattttaacaagtaaagtcagccagatggggactattgtgatctggagggcagggggaaccacaaatcaactctattctactgacaccattcaagaatttgagtcctggttgtcagattttccttttcttttctaaaagaatcctgaaattcagatccttatgtgtatttcccagtattttctgttggctaatcatttaaaaatctttcaaagcacagctcaggcctgacaaaatatatctttttccttaattcagtccatggaccactagttttcagtctccaatgtcatccagctgcttcgtgttaggtaataaggcccaaacagtacttaacctaactcagttcagaaaagacagcttcctacaaaaaattagccaggtgtggtggtgcgcacctgtaatcccagctacttgggaggctgaggcatgagaatcacttgagcctcggaggcagaggttgcagtgagccgagatcgcgccactgcactccaggagcctgtgcgacagagcaagactgtatcaaaataaataaataagtaaagtaactaaaaataaataaaaagaaaagaggacttcctgaagctaagaaaaatcaattcttaaaagttaatacaattttaaatttgattgccagtttattataagatgttttaatcagatattttgccaaagttagaaagggctaggatcatgcctgtaatccgaacactttggcagcccgaggtgggtggatcacttgaggtcaggagtttgaaaccagcctggccaacatggtaaaaccccatctctactaaaaatacaaaaaaattatccaggcatggtcgtgggcacctgtattcccagctacttgggaggctgaggcaggagaatcgtttgaacctgggaggcagaggttgcagtgagccgagattgtgccacttcactccagcctggttgacagagtgagatgccatctcaaaaaaagaaaaaaaaaaaagaaagaaagaaaagaaaatataaaaacagttcatccagtagaatgagacatggtggattaattttagaggacagttatgtctaagtgtagattttccactgcaaagacagatgtattagtattatctccagataattaaggaaatagacaaaacaactcaaacatacaagttctaatgtttttatcacacaaacatatacgaattttgccctgtattcttggagaaacacaaccattttctccctacaacttgcttctctagcaataggatctgccagagaatacagctatgagtatgttttccaggaaaaatttgttgtattttaaattgacaattttttcatcttttcatatgaaagccttatttgctatttatagaggcctattgttttagctgcctacctggttggagtgacaaagaaccagcttttcttgctgaaaactgaactaaaccattttaatactcctgcttccctagacaaactttttctaaataaacataatcatgggtgctgggtgttttattttgtaattaaagcctaaaatcatcccttgtcttatattcctcttcacatctatacatatactcatccttttctacctccctcatgcacagaaccacaaatttacaactgactgaaatgaatatgtttcatgatgtatttatttttctctccaagttctgcaagaaaaactgtctagaagccagtgaccattaataactcctttcttgccaagtagctactggtatttgttcaaaacatattcatagcttgccactctaacaacttggaaagtagtttaaaatcactaccatccttttccatcccacagcaattttgcatttcagtgcttcactggacatctcaggaataatcaataggactcagattttcctcttaacttgtagggtagaactttgattggtagggatgtcaaatcttggaaggtttgactaaaccccacttccttctccttcccctcaatgtgggcatccctaagactctgtccttttcttgctcctaattttcttcctcagagctctcacctctcccgtgggatcaatgattcctttcataaagatggttggtagaactatcatcttactatgtttgtgttcttatatgtaacattgtgtattttatatataacataaaatgtactattttagccattttaagcatacatttcagtgacattattgtgcaaccatcaccaccatcacacatctccagaacttttatcttcccaaactgaaactccatcccattaaacagtaacttcccattccttccttctccaagcccctggcaaccaccattccactttttgactctatgatttttttttttttttcagataaggtctcactctgtcacctaggctggagggcagtggcgtgatctcagttcactgcaacttctgcctcccggattcaagtgattctcctgcctcagcctcccaagtagttgggattacaggtgggtaccaccatatctggctaacttttgtatttttattttatttatttatttatttttgagatggtgtctcactcggttgcccaagctggagtgcagtggcatgatctcggctcactgcaacttccacctcccgagttcaagtgattttcctgcctcagcctccagagtagctgggattacaggcgcctgccaccatgccctgctaatttttatatttttagtagagatggagtttcatcatgttggccaggctgatcttgaattcctgacctcaagtgatccgcacgtctcggcctcctaaagtgctgggattacaggcgtgagccactgtgcctggccaaagtttcttttctaacatctcgtataaagacttctcttctaagctccatctccacacttccagctgtagtggatacttttcttagttgtgctatggctgatcagtccttctgtatgaaactcctactcctcagtaactcaggcttaagaaatataaggtagcttttacttttcatctcttttattgtcattattccaacttagactcttaatatttttacctctacctccaattcatactgttctatcttgctaaactaaacttaaaatatcttctgtcactttcctttccaataccctctagcttattaaataatttctaaaattcttagctaaatgtcagaggccctcttgatctattccttactcttagtttgtttggaatactataacaaaatatcttagactgggtaaattataaataagagaaacgtatttttccacagttctgaaggctgggaagtccccgatcaaggcactagcagatttgagtctggtaaaggcttaccctctggttcatagatgacatctcttgctgtgtcctcacacggtggaaggggcaaactctgtgtcctcacatggcagaagggcaaaagtgggaacaaatgctgtgccatcacatggcagaagagatggaaaggccaggaagctctctaatggacttgtaaaaggccattattaattccattgtttgagagttaatcactttcccaaatgccccacctcttaataccaccacgatgaggattaatttttttttttttcaacctggagtttcactcttgttgcccaggctggagtacaatggcacgatctcagctcactgcaacctctgcctcccgtttcaagcgattctcctacctcagcctcccgagtagctgggattacaggtgcatgccaccacggctggctaagttttgtattttcagtagagacaggggtctcaccatgttggtcaagctggtcatgaactcctgacctcaaatgattcacctgcctcagccttggaaagtgttgggattacaggcatgagccaccgcacccagccggagattacattttgacatgaattttggagggatgcaaatattcaaaccacagcactagccgacatttttagtttccatatcagttgattaatctcaacagagtcaaccatccactccactccatctgtatctattaaactcattaaatgccttgtgttttcctgcctgaatatcttggccatgcgatttcctatatctggacagcctttctctctctcttcactatctcctcctacacatcttcctgtggattgcagcacacactgatgtctctcttttctctctttagtaattattgtaaatctctcttttacttcttagcaaataactgtcttggaattatttttccacttttctatgtcttagtttccagctagattgtacattcctggagtcagggactatgtcatttacttattcattccatagtgactgagtacctctggaatgtttttggccctctgctggggttacaaattggtttgtggtgtgctcactgcttttaagttgctcacatggggatatagacacaaaggcaaattattgcaattcaatatgataatggctttagtggagccacagacagaaaaagaatagctaaccttacctaggggaactgaaaagggcttatacttgacatttccacattgaccaatgatcccctaaagaatcacataaattccttgtaggtgataactcatgattttcacaattgatttttctgtcactctagagaaaccattagtcttttcatgaatttgtctgcagtattcacatgtgtggatgtttttaaactaccgaatgttaggaaaaattgtcaggccctaatgaattagaattttttttgcaattcaaatttacaatgggtacatatagacccctaccttgaagacggtgttccaggagtcaggaaattgctgcagtacatggtctacttcccaaagcctggatgattggtgaagaatggatgtctggagaataaagtgatagtattcaaggccaggcacagtggcttatgcctgtaatcctagcactttgggtgattctcttgagcccaggagttcaagaccagcctgggcaacatggtgaaacctcatctctacaaaaaatacacacacacacacaaaatagccagggatggtggcatgtgcctgtgatcctagctacttgggaggttaaggtgggaggattgcttgaggccaggagttggaggctgcagtgagctatgattgttcaccgcactccagcctgagtgacaaaaagagatcctgtctcaaaaaaaaaaatacataaaaataaatacataaaataaaaatagaataaaaagaggatactattcaggtaacacccagtactcaaaagaaaagatggtaaaacttttaaagattatgttatttttgatggggggacgtgtcttagtgcattcctgctgctgtaataaaatgccacagactgagtaattataaatattagaaatttatttctcctagttttggagactggggagtccaagttcaaggctcagacacatttggtgtctggtggggacccactgtctgtttccaagatagcgccttgttgctatatcctccagagaggatgaacgctatgttcttacctggtggaaaggattgtaggataaaagagactaagatgctgtcttcaaccttttttataagaacactaatctcattcctaaggatggagtgcttatgacttaattgcttcccaaaaggcccccacctcttactgttatcacattgggtgttaggttccaacatgaattttggagaaaaacacacattcaaatcataggcaagtgggaatcttatatgtagatattttcatttctcttcccttctcataaggtccatacctcaaagcctgctggatgtcgctgatttcatgtgttaaagaaggaaaaccctttcctgcctctgaggacttttgcctagagttcagttaattaggaaaggggaaaaactagtcttgagaatctgcccctaatgggatgacatcccagctctttaacgctgcatctatgatattcctcacctgtacatccagttaaatgagaccatttattgctttattcaacagttacttgttgaaggtctattgtctgccagaggctcagagtaaatcactgttagtccatttgtgctgctataacaaaatatccaaaactaggtaatttataaacaagagaaatttatttcttacagttctagaggctgagaagtccaagattaaggtgctggcagggtcagtgcctggcgagggctgctctctgctttcggatggtgccttgttgccgtatcttccagaggggatgaataccatgtctgcacatggtggaaggacaaaaaaggggctctgcaactcacttgagctttttttataaggagatttatcctattcatagagccctcatgacctaatcacctccccaaagccccacctcttttttttttttttgagacagggtctcattctgtcaaccaggctggaatgcagtggcatgatcatggctcaccgcagtctcaaaccgaaacgatcctcttacctcaatttcctgagtagctgggactacagatgtgcaccattatacctggctaatttaaaaaaattgtttttgtagagatgggggtctcactatgttgcccaggctggtcttgaactcctgggctcaagcaaaccttccaccttggcctcccaaaaaatgctggaattactggcatgtgccaccaagcctggcccaagccccacctattgatgtcattgccttaggggttaagttccaacatgaattttggagggacacattcaaaccatagcaatcacaggaatggtgtttacctttttggagccgacacagataaaatagagtcacaaacaagaattaattagaaacagtgataggttttatcaaggaagcacaaatgtcagcaacagagaaaaattaggtaggactctctgtgtttgcccagagaagtgtgttccaaggaggtgacattaaagttggcagaaagatgaggaagagccaggcagccttagagtagagggagtgtcccaggaaagagagaactgtgtgtatgagagggtcccaggatggggggacagggagagaggagggctggagagcactaaccccatctaactggcagggatatgacatgggagttaaagagtacagactcaggaaccagattgacctggttcaagtctccactctgcctctgctaacgctgtgatttcatgtaagcttcgagttcaatttttcagttgtctcatctataaaatggaggttaaacataatacttgtctcatagggtttcaggagaagccataaacccactttttaacatgaactctcccaatttttaaattttggtcacttatttggaaagattaaaaaaaaaaaaactgagtaaattgacagggcccagtggctcacgcctgtaatctcagcactttgggaggcagaggcgggtggatcccttgagttcaagagttcaagagttcaagattagcctgggtggccaggcgtcgtggctcacgcctgtaatcccggcactttgggaggccaaggcaggcagatcatgaggtcaggacctgcctggccagcatggtgaaaccccatctctactaaaggtacaaaaaactagccgggcgtggtggtgtgcaccagtaatcccagctactcgggaggctgaggcaggagaatcagttgaacctggggtgacagggcaagactccacctcaaaaaaaaaaaaattagcctgggctacatggcaaaaccccgtctctacaaaaaatacagaaattagccaggtgtggtggcatgtgtctgtggctgcagctacttgggaggatgaggtgggaggattgcttgagccggaaaggttgaggctgcagtaagctatgatggcgccactgcactcaagcatgggtgacagagtgagaccctgccttgaaaaaaaacaaaaacaaaaaaacccaaactgagtatttaactccatttgtgaactctttatgacttggggggggtcactagtttacagtcttttatttggtgcctcatatggcccatagtttggattttttccctcaagttttatgggaattcattgagatgacataatctgacctatgttttaaagatgatgtgactgcagaccagaaaatggattagagagggcaacggggaagcagtaagactgttaagacttggatgcaatttctagaatgaccctagaatgctttaatgactcagctcagctgtttagttacttccttttccatttgctcccatccctaaactcccgttagtccagagtcattctgagactttcttaaggcttcatccatttacatttggaagcctctgcccatattatctatgtatttgttcattcatccattcattcaacagacacttacttagtatttttctctgtgccaggtactgttcactgttctaagcacttgacatttacttctcacagtcttctagaggtaggtattattattacccttttttttttttttttctgagacagagtcttgctctgtcacccaggctggagtgcagtggcacaatatcagctcattgcaaccaccacctcccaggttcaagtgattctcctgcctcagcctcccaagtagtggggactacaggcgtgtgccaccattccaggctaatttttgtatttttagtagagacggggtttcactatgttggccaggctggtctcaaactcctgacctcaggtgatccgcctgtcttggcctcaccctcctggaacccctaagtatctaaagtcctgaactcagtggcctgagggatgggctggcctcacagtgctcccagtctctatcctccacctctgatcctttcctgtctgtatctgggatcctggcccctactggttcaggccctactgactgaaaccctgctccaaatccctgcctagaattgagctcctgctgctttgctttcctcttgccagtcctgccatagggcactggagttttgccctgcagatcaggggattgagttccagatcccctggcctcacctgccctctgtgtagtgtctgcggctggattccctctcatttagcctacctggattgcaagtcacaggagctgaccatttccgaacaaaaccctgagagccaaatccgttgtgtttcttggacattgtgccagtccagtcagtacctctatttggcagctctatcgtgccagcctccattccaccctggaactcagggcgggtgatggatccactttgttggtttttctgccttttctcccactatctctgatggaccttctgggtactgagtagcacttcctttacatctgcttatgtgattatttggattatttatgtcttccttgttactcataagttctgcaaaggtgaggctcaacactgattttgcacagcattgtatcccagaatctaacagtgccaggcacttagatggtgctccgcatatttttattggatagattaatgacactgaggtgcattttgtatttacccttcctgttctgttccctttttttctcttccctttttcattttttcctagttcctctactctcttggcttcttcaaattcttaatctttttatctgataagagatggttctcctttccctgttcatgtattttgaatcaaagggctgctatttcccatttccatcttcattttcaaatgtgtggtcatacaatgctgttccaaatatatatatctggaagaccaggttaaaggctcagatagatttggtgtcttgtagggaccctgtctctgttttccaagatgttgcttggaaacagcagccttgttgctacatcctccagagggaatgaacactatgttctcatgtggtggaagtgatggtagacaaaagagactagggtgctctcttcaacctttttatttttgatggagtctccctcagttgctcaggctgaaatctgaaggcgtgatcttggctcactgcaacctctgcctcctgggttcaagagattctcctgccacagcctcccaagtagctgggattacaggcgcctgccaccacaccaggctaatttttgtatttttagtagagacagggtttcaccatgttggccaagctggtctcgaactcctgacctcaagtgatctgcctgcctccacctcccaaaatgctgggattacaggcatgagccaccgtgcccagcacccccttattttttttttataagaacaataatcccattcgtaaggatggatatggccaggtgcagtggtgcatatctatagtcccggctactcagaaggctgaggcagaaggatcgttcgagcccagtagttggagacccagcctaggcaacaaagcaagaacctgtctcaaaaccacaacaacacaaaaaacaagcggcagcttcagcaaatggaattataaggtggatgtatagtactctcaaacaccataacactgaaaaaaaaaatcagaggaaaaagagaactaaactctgcacaggaaaaaaggcagtgggtagtatttttcaaatgtcttgacattctaagaagtctctcaacagttaataaatacgattttctttggaaactgcctgtgaaatattttaatatttaagatttgttttggttattaagcttatgtaacatgccaaggcagaaattaagttacaaaaattcttgtcacagttggatatgacaacaacccattagtctagaccttaaaatgaaactagttcatacagtaatttttttttttttttttttgagacaggagcttgctctgtcatccagcctggagtgcagcatgcaacgccagcttactgaaacctctgcctcctgggcttaagccatcctctcacctcagcctcctgagtagctgggactacaagcgcatgccaccacacccagctaattttctttttttttttgatgttttgttgagacagggtctcactatattgcccgggctgttctctaactcctgggctcaaatgatcctcctgcctcagcctctcaaagtgttgcaattacacgcgtgagccaccacaacccacccataataaatatttgtaatttctacaatgcttgtcatctgcagcccttcaatgaccagcaaacacaaatagccttattttcctgtggttgaatacatttcataacacctggtagccaagcttactctgagccccatgagacaggaagggaagtatatgcttagatcaagacactttgtatcttgcaagaaaagaaatgggtgctaaaaggtaagtggcctgacaacatttcctagagaaatgcgtgaggtatggggaactctgagtagagcccagatttttcttctgggaatcatcagctctgaggaattaagggaaaggtgaaatcatggtttgtcctgtgttgaaaagtttagtaatctttcaactcacatatcatactggactattccctactttttttttattgttttatttcttatttatttatttatttatttttgagacagagtttcgctcttgttgcccaggctggagtgcaatggcatgatcttggctcaccacaacttccgcctcccaggttcaagcaattcacctgcctcagcctaccgagtaactgggattacaggcatgtgccaccatgcctggctaatgttttgtatttttagtagagacagggtttctccatgttggtcaggctggttttgaactcctgacctcaggtgatccacccacctcagcctcccgaagtgctgaaattacaggagtgagccaccacacctgacctttcttttcttttttgtttctttattttctttcctttttttttttttttttttgaaagagtctccttttgtcacccaggcaggagtatagtggtgtgatctttgcccattttaacctccaccacctgggttcaagagattctcctgccttagcctcctgggtagctggagctacaagcatgcaccaccacgcgggctaattttttatatttttagtggagacagggtttcaccatgttggccagactgatctcgaactcctgacctcaggtgatctgcccctctcagcctcccaaagtgctgggattacaggtgcgagccatggcgcccagccagttccctactcttttataccattaggatataaaccaacagactggttgatttgcacatttagaacagcttttctggtacttagtgtctgtcaaaatatggagaaaacaatgtaacagaatcagtggtcagctgagttcacttgagtcctggccctgccaacaagttagctatgtgcccttgggcgtatctcactgtcagacctcagaagaggaaggaagggagggagagagagtgagtgattgagagagagagagagagaggaaaggaaggaaggaaggaaggaaggagggagggagggaagggtgggcgaaaaaagagaagaagagagggaaagaaagggagagtgatgaagggagaaagggagtaaaggaaggagggaaggaggaagaaaagaaagggagggatggaaaaaagatggaacaaaatgattatgaagctctgtttcagttgtaatagtcaaaaccatgattcttttttatttccttttcctttttcttctttacaacacaagagcaacttcacaagaaaaaatgcaaagtcacaattgatagatacacatggctttctcccatctggttttggcaggacatccaatgattcctttgttctaaaaaaatatttaaaatcatagatgataaaaacaaatggaaaaacattccatgctcatggattgcaagaattaatatcattcgaatggccatactgcccaaagcaatctacagattcaacactattcctatcaaactaccaatgtcattttttacagaattagaaaaaaactatcccagaattcttttttttcttttttctttttttttttttttgagacggagtctcgctcagtgcaatggtgtgatctcagctcactgcaacctctgcctcccagactcaagcaatttttctgcttcagcctcccaagtagctaggattataggcacccaccaacatgcccagcaaatttttgtatttttagtagagacggggtttcaccctgttggccaggctggtcttgaactcctgacctcaggtgatccacccacctcggcgtctgaggctgaggcacacttacaggtgtgagccactgtgcccggccctcaaattcatatggaaccaaaaaaaaacaaaagaaaaaaaaagcttgaatagctacagcaatcctaagcaaaaagaacaaagccagagacatcacattatacaacttcaaattatactataaggttagaaagaaccaacacagcatgacactggtataaaaacagacacacagaccaatggaacagaatgaaaaccccagaaataaagctgcacacctacaaccatctgatcttcaataaagttgacaaaaacaacaatggggagaggattctctatttaataaaataaaaggtgctggaattactggctagccatatgcagaagaatgaaactggatccctccctttcatcatatacaaaaattaactcaagatggattaaaaatttaagtgtaatacctcaaacaataaaaatcccggaagaaaacctaggaaataccattctggacattggccttagcaaagaacttttgattaagtcctcaaaagcaattgcaataaaaaaaaattgacaagtggaacctaactaaactaaaaaggttttgcacagcaaagaaactctcaacagactaaacagataacccacagaatgggagaaaatttttgcaaactatgcatttgacaaaagtctaatgtctagaatctgtgaggaacttaacaagcaaaaaacaaccttattaaaaaatgagcaaagaacatgaacagacacttctcagaagaagacatacaagtggccaacaaacatatgaaaaaatgctcaaaactactaatcttcagagaaatgcaaatcaaaaccacaatgagataccaccttataccagtagagtggttactattaaaaagacaaaaaataacagatgctggctggttgcagcagctcacgcctgtaatcctagcactttgggaggctgaggcaggcagatcatctgaagtggggagttcaagaccagcctgaccaacatggagaaatcccgcaaacactaaaaatacaaaaatagccgggcgtggtggtacatgcctgtaatcccagctactagggaggctgaagcaggagaatcgcttgaaccaggaaggcagaggttgtggtgagccgagatcatgccattgcactccagcctgggcaacaagagcgaaacttggtctcaaaaaacataaaataacagatgctggagaggctgcggagaaaagggaatgcttatatactgaaggtgggaatgtaaattggttcagcctctatggaaagcagtttggagatttctcaaagaactaaaaatagaactaccattccatccagcaatctcattactgggtatatatccaaaagagaataaattgttctaccaaaaagacacaggcacttgtatgttcattacagcactattcacaacagcaaatatatggaatcaacctagatacccatcagcagtgaactggataaagaaaacgtgatacatatacagcatggaatacaatacagccataaaaaagaatgaaatcatgtcctttgtagcaatatggatgcagttggaggccatgatcctaaggaagttaacacaggagcagaaaaccaaatactgcatgttttcactttaaatggaagctaaacattgggtagatatggacataaagatgggaacagtagacactgacaactgctagaaggacagatggagagaggcaaggcctggaaaatgacctatagagcactatgcttactacctgggtgatgggactatctgtaccccaaacctcagtgtcatgcaatatgtcaagtaagaaacctacacatgtatctcctgaacataaaataaaagttgaaaaaatgctttgtgttgtgtttcctcacaagaaagaagcagctaaccagtctggatcatcagagagtgcctctcctacccagtggaaggagatccttttgcttggctggggcagaattattagctggcaggtacagaaactgcaggggcatctggacattgcattttcttatctcatttttgcactttgcccgtattaaccaactacctagatcttcactgcataccacatggactgtgaatggctgctttcacttgctttgctgttaagtcatattaatatacgtgtatcaaatttctagaaaataatgtctttgcagtgtagggaatatgatgaaaccaatggcactgtccctaccctagtgagatttgaatgggcatagagaaatgtgctctttctcttcaaggcatgcaacttggcctcccctttccttctctttgtttggattcttgtagttgcaaaggctagaaaaactctattaataaaatttcccatagcaaaatggggatctctactggcttttaacacagaccagtttgcacacagccggatttcgggattcaattatgttactgagtcaggtccatctcttggctagaatttccctcatgtacactttactctctggaaggtcatcgtcagaaaggtgaagcccagcagaacagctggcctaatcttcacaactttcatccagcaacaaaaaaaataatacctcttttctggtcccttcagcaatagttgtgggattggttcagagtgggtctgattgggtgggtgccattcctgaatcagtcactgtggctaagggaagggatgctccgattggtctggtcttagttaacagtcaacaaaaggagctgagaatgtggttgaccccacttactcagctacagggactgacaatgggcaggggacaaaatttcccaagagaaaggaaggacacctttacttaactccaagaagagtgaatgaatactggccgggctatgtgaaccaatatccacattatcctataacatgaatcttctgaatctcttcattcagaagaataagggagactaagcaggcagagggacgatgagatcaaccaggttgaagttggatacttgaccaaccccagtatcattttatcctaaggactaactgaaccaagtactaagtagactgtccacttttctgtttatctttgtcatatcacaagttagaattcttacaaatccttagtaaagctgctccttataatgtacacagggttttgctacattattgtttaaatgttgaaaagggtttcttttttcatccctcattgcattttggtttttcatagtgtgcaattttgctgcatttataatcattatgtactttgttttgggagaatgcattttgtcataaaagctcttcacacagcaagaggaatgatcagcttcacgatcaatatcccaggacaacctgttttttttcctccctaaaaatattaaaaataaattgtaaaactatatgtatagaaattgaataaagaaactgaaaccattttgattcttttaatcaagaaataattaatgtgtgcatgacaatattagaatattatttttaaaaggctgtatgtatttctttcccttttcctttcacaaagttgtcatttaaatctagctttgtttgtgatataataatgcagcacttgtgcacaaagtgtgacaaaactaacagaaagacttcttatgaataggaaaaatgaatgttttttaacttaaaggaaactgtatttaaaattcaatttttgaaaaatataataaagtcaaatataaatattatgaacagatgtttcttaagaagcttctgaaatgaatagtcaccatctggaaccatttacaaggagaagaaggtaagcacgcacctgtttctttctttaaaaagatgtaatctctgtcccaaattataaagaagtatggcagttaccataaaaatgtaatactcaatttgtcaaactgtttagaaaaatattgataagaatgtagatggtttagaaaagtgtgcttctaaaaggcttaatctgtcttcagatttgtttataattttttaaagataaaactctttaaagtggatgcatgttctaagtttcaaaaaacatgcgcaaaacctcaatagacactatcactgctgctgccaccactatcatccaaggtatctatttgctcattattgcatgttagatactccacaacaaaagttgaacccatatactccttccagttaatatgattgattgcattagtggctctaattaatgcccttcctttatccatggcctttgcaacatggtattgcagcagctttcatcaaaaaatggagtttttggccgggcatggtggctcacgcctgtaatcctagcactttgggaggccgaggccggtggatctcctgaggtcaggagttcgagaccagcctgggcaacatggtgaaaccccatctctactaaaaatacaaaaattagctaggcatggtggcgggcgcctataatcccagctgcttgggaggctgaggggcaggagaatcacttgaacctggggggtgtagattgcagtgagctgagatagcaccacttcactccagcctgagagaaagagtgaaactctgaaatggagtcttgttgcccatcctttgcatctgggctgaacttgtaacttgctttggccaacagaatacaggagaagaaacagcatgccagttccaagactagatctcaagaggttttgtactttctcattctccctcgtggagccttgctactgccatgtaaataaacttggattattctgctggaggaggagagatgacatgggggagagccttgcaaaggccatcttagagcagtaagacagcaagccaagatcagcaaagcagccttacttagctgtttgcctgcagcaggaggcttttaatttctccctgtcttaggattgagagggtgatacaaaagttgctaaaagattttgggaacttctggctactgtccttgaactgtagggaggtaggcatagttgcagggacatagtgcaaaagagaagatgctgggatttacagatagatcttgatttgcagattggaggctctaaataaacaaaataggaaaaactcatggggtttgtatagaaatacaattaacttattgaggaggataatctattttaaattattttggcatatttttaatataattacaaatgaggctaatctctttatcaaaactcttccttcctataaatgaattcttcttgttcaatagttagctccacatgctgtatgttcttctaaaacactcaactactttatctgtaagttaattcatttcctagctaattcatcttaattagaatacttttaccataactgaattgagttgtattaactccattagtaaatttatctgaaagttcttgaaacaaaatttcaaagagtgaagcaatgaagagttacttttcaccgggtgtggtggctcacgcctataatcccagaactttgggaggccgaggtgggcagatcacgaggtcaggaattctacaccagccttgccaacatggcgaaaccccgtctctactaaaagtacaaaaaaattagcccagtgtgctggcaggtgcctgtaatcctagctacttgggaggctgaggcaggagaatcgcttgaacccggaaggtggaggttgcagtgagccaaaatcatgccattgcactccagcctgggtgacaagagccaagactctgtctcaaaaaaaaaaaaaaaagaataaaaagaaaagttatgtttcatattggtaatgatcatttattggttacttccctggcatctatcttccagttttccctttacctttactccacaatgtgaaaacctccacagtgtaaaaccctcattcctggtcatgtgatttgggtggaaccaactttactccaaatgacaggggtgggctctgattggcttatgtcccatggtcacttgtgttggttctggggtgatatgctgcacagtcagagacaacaagatgccaggagatgtttgttggccttctgttgtggaaaagctgggcaatttccctgcatggtatgagaactagaattgcgccgggcgcggtggctcacgcctgtaatcccagcactttgggaggccgaggcgggcggatcacaaggtcaggagatcgagaccgtcctggctaacgcagtgaaaccccatctctactaaaaatacaaaaattagccgggcctggcggcgtgtgcctgtaatctcagctgctggggaggctgaggcaggagaatggcgtgaacccgggaggcggagcttgcagtgagccgagattgcgccacggcactccagcctgggcgaaagagtgagactccgtcaccaaaaaaaaaaaaaaaaaatgataactagaattatggaagtttccttccttccttccttccttccttccttccttccttccttccttccttccttccttccttccttccttccctccctgcttgcttgctttctttctttctttctttctttctttctttctttttttgactgagtcttgctgtatcgcccaggctggagtgcagtggggacgatttcggctcactgcaacctctgcctcctggattcaagcgatcctcctgcctcagcctcctgagtagctgggattacaggcatgcaccaccaggcccagctaatttctgtattttttagtagagatgggatttcaccatgttggccaggctggtcttgaactcctgacctcaggtgatctgcccacctcggcctcccaaagtgctgggattacacgtgtgaaccaccaggcccagccagaagtcatttttctataagcagaggaaaggagatcctagagttgccagagagccacaaagtggagtctaacggtaaagccagaccatagaaggcagaaaagagacatatagaaaaaaaatgggtccttggaaacattattcgagctgctagatacagccttgcctgaagttaacattgcctctggagtttttgctgatgagaccgataaatttctattattatttaaaccaaattgagttgttttcctcacttgcaagtgaaagatcactgaaacaatctgtacctcttagtttccaggtttgcctcaagcaccctagttcaggccctctttcctcttgcctggactactgcactctcttaactacaggccctatttcaagactttaccttcagatctctacttccctactgggttaatatctattttttttttttttttttttttttgagacagagtctcgctctgtcaccaaggctggagtgcagtgacgcaatctctgctccttgcaacctccgcctcccgggttcaagcaattcccctgcctcagcctcctgagtagctgggattacaggcatgcaccaccacgcccagctaattccagctaatttttgtatttttagtagagagaaggtttcaccatattggccaggctggtcttgaactcctgacctcgtgatccacccgcctcggcctcccaaagtgctgggattacaggcgtaagccactgcgccagcccatgggttaatatctcttaagcacatctacagtcatatctccttgctcaaagaccttcagtgggtctccagtgctgactggactgtactaaaaacaaacatcttattttgacattccaggcccacctccgtgtttcccagccattcttaaggcttcccatgatctccattcaatgttggtaagtcagaaaatatcttttcactttttcttattcttttttttttttgagatggagtttaattcttgttgcctaggctggagttcaatggcgcgatctcggctcactgcaacctccacctcccaggttcaggcgattctcctgcctcagccttcctgagtagctgggattacaggcatgtgccaccaggcatggctaattttgtacttttagtagagacggggtttctccatgttggtcaggctggtcttgaactcccgacctcagatgatctgcctgcctcggcctcccacgcctgggattacaggcatgagccaccgcaccggccaactttttcttatttgacagctcattagtgtttagcattgttgatggctctctactaagacgttcttttccctagtgtctgtaatacagcattcagattgttcttctctactcaaatattaaatgttggactttttcacgtttgtattctagtattgctttcttctgagttgacatacatcacattttctggacatctctcatctattcctatgacttaaaattccccctttttgtctttactttctttttcttttctttttttttttttttttttttgagacgaagtttcgctctttgctcttttcatccaggctggagtgcagtggcgcgatctcagatcactgcaatctccgcctccccagttcaagcaattctcctgcctcagcctcctgagtagctaggattacaggtgcatgccaccaccagctaattttttgtatttttagtagagacagggtttcaccatgttggccaggctggtctcaaacttctgacctcaagtgatctgcccaccttggcctcccaaaatgctgacattacaggcgtgagccatcgcacttgcttttttttttttttttttttttttttgagacggagttttgctcttgttacccaggctggagtgcagtggcacgatctcagatcgctgcaacctctgccccccaggttcaagagattctcctgcctcaacttcctgagtagctgggattacaggtgcctgccactacacccagctaattttttgtatttttagtagagaaggggtttcatcatgttggccagactggcctcgaactccagacctcaggtgatccacccgcctcggcttcccgaagtgctgggattacaggcatgagccaccgtgcccagactttttttttaaaaaaaaaaaaaaaaaaaaaaaagatgaggcctcactatgttgctcaggctggtctcaaactcctaggctcaagtgatcctcttgccccttggcttctagagtcactgggacggcaaggtgcaccaccacatctggctaaaataccttttaaatgccaatgactcctaaatccaaggctccagctgagacttctcctctaagtttcaagtcccaacatccattttttccattggacatcctcatctcagcctttccacgttcccctttcctactcccatagttgtcaccacttatctaggtgctcatgccagaaatttcgaaattatgctggtctcttgcacctttttaattcttcaaatctaatcaaacactaaatcctctcaattctacatgctaaacatctcttgtctttgttacttctctctgttccctggccgtcaccctctaggaaaagccaaaaatcacctgtcctgaactattcaatagtctcctaactggtttcccaactcccacaacctttcaacatttactggggggcttaattaaaaatactaaacacaaattgggctggacgcagtggctcatgcctgtatttacttttttttaatttaaatttaatttcttttatttttttaaacagaaattcactctgtcacccaggcttgagtgcagtggtgtgatcttggctcactgcagcttctctgcctcccaggttcaagcgattctcctgcctcagcttcctgagtagctgggattacaggcacacaccaccacccctggctaatttttgtatttttagcagagatggggtttcgccatgtttgacaagctggtctcaaactcctggcttcaatcgatctgcctgccttggcctcccaaagtgctgagattataggcatgagccaccataaaatactttttaaaattttaaaaatacagaaggagtctcactatgctgcccagactggtctcaatctcctggactcaagcaatcctcccatcttggcctcccaaagtgctgggattatagttgtgagccattgtgctggcctcatgtatataatcccagcactttgggagactgaagtgggaggattgcttgaggccaggagttcaagactagcctgggcaacatagccagaccttgtttctacaaaaacaagaaaactatccaggtgtggtggcgcatgcgtatcatcctagctactcaggaggctgaggtgggaagatcgctggagcctaggaatttgaggctgcagtaagctatgattgccgccactgcactccaggctgagcaacagagtgagaccctgtctcttgaaaataaataaataaacacaaattctgtctttcctttttaaaatgtcatgcttacatgtgcgtgaagattgaaaataaattaaaaaggaagctaaatgttttgcataaaataaatttctcaaagtatattattagcttgtgaaataaagaagcggatacagatgccccttttaaaataatattttaaaaccattatttaaataagtctcttacaaaggagtatatttgagaaagcaaagaagtaaaaactctcaaacctcttagcatgtttctatcttcgtatctatttgccacagtggagagaattgctgacaaaaaaaaagttaagtactataggtcatgcaaataggcagttgctaatgacaatgttacaagttaaaaatttgaattataaacgttgaattaattttcattgcatgtggtttcttttgataagatccttttaaatgtagtctaaattttaatttattgcacttaaaaataaaatcaatgccatttattaaaagaaaatgtgggctgattgttaattcagcctttgtgtttggggtaaatgagtcagaacctcctagcatctaagcttttcttaggtggtaaagggaaattcttgggaacctttattaacttttcctagccacatgaacatgttcaaaaagctacagttcgaaagctgtgctaacaaagaagaatgcagggcccaaactcaaactgattgcactgttcagttcactcagtaaacagtcatttcctacattagccagttatcagagctttaggagatatgccaaatacacataattagtttttgaaaacttagtacataataactgcatttaaggccaaaaatatactaaacataattttaggtatttgtgaacttaataattgatactgttcatagcattatgctacatgccctgcatgcactatctcatttaatcctcccaacaattcaatgtgatatgtactattattctctattccctttacacaatggaggcaattgaggctcagagtggttaagtaacttgaccatagccacacggctagggggagctagaattacgggccatggagctgggtgtggtcgtgggtgcctatactcccagatgggaggatcccttgagcccagcagcataagggcagcctgggcaacaaaaataagaccctgtctctgaaaaacaaaacaaaacaagccatgttttccgactctgaagccagtagatttagtcacaattgtgtactacttctttttagattacaaatttgaatattcctgtcctgtaaggtgtggaaatgataataccaatttctgattatacaataatgaaaagctgaatttgacgccatatttaatttttcaaatttctcacaggaaatatatgtttctcccagagagagttttagcaatcaaaaaacagttcttccaggaaatgggtggacttctcttatctcaggacacttggtggcttatcagtatcaacttgatttcccaatacttgttttagagtaatttaaattctattaatgctgataagccctgcccatctccgtatcagttacaggataggacatctgggaggcaggctctgtttgatggggacagcccagtggggatttgcctgggggaagaggaaataagtgcaccttaagcagagaattgagaaaactagagtctagctcactgcaacagtttgtttgtttcttgagacagggtctcactctgttacccaggctggagtgtggtggtgcagtcatggttcactgtagccttggcctccctggctcaagcaatcctctcacctcagcctcccaagtagctgggactacaggcacacaacaccatacccaactaatttttgtatttttggggtttctccatgttgtccaggctggtctcgaactcctgagctcaagaagtcctcctgcctcagcttctcaaaatgctcaacagttattaaataaaggtggagcatccctgacctgaaaatccaaaatctgcaatgcttcagaatttgaaaacttttgagcaccgacatgatgccacagtggaaattccacacctgacctcatgagataggtagcagagattatttaaaatattgtataaaattaccttcaggctacgtgtagaaagtgcatatgaaacataaatgaactttgtgtttagatgtgggtcccctccccaaggtatctcattatgtatattccaaaatctgaaaaaattccaaattcaaaacacttcgggccgggcggggtggctcacccctgtaatcccagcactttgggaggccgaggcaggcagatcacctgagatcgggagttaaagaccagcctggccaacatggtgaaaccccatctctactaaaaatacaaaaattagccaggtgtggtagcacacatctgtaatcccaggtactcgggaggctgaggtaggagaatcgcttgaacctgggaggtggaggttgccgtgaactaagattgtgccactgcattccagcctgggtgacagagtaagacttcatctcaaaaacaaaaacaaaaacaacaacaaaaaacccactccagtaccaagcattttggataagggaataagggacactctacctgttcctgtcatgtgttaggcactgtgctccccacttttatctggtaatattggcttttacagttgaggaaactgaggcccagaaaggtgtgacagccacagtcacagtagtgcagaaccctaatgtgtccgacttttatccaacactctgctccgcagcgctgtcgggtgaaggcatgcacagaggctggaatccagcactcactgcctgttcagagtcccaggacagggcaactctgagccagcacagtgagggctgtgagaaacatgggacactgccgcctgcctttcagaacaatgcagtttcgcttcctctgggatcaagtccaacgacgattgtacttcccaatctcctctcccagtttattaacagacgcaagttttctttatcaaaaaaaataaaaaacctttccttgaccttgctacacttggaagcaacccccttatctttcagctcttccttgctcaacctctcttaaaaggggtttacaccaaggccaggcgccatggttcgcgcctgtaatcccagtattttgggaggccaagatgggcagattacttgaggtcaggtcgagaccagcctgaccaatgtggtgaaacgccatctctactaaaaatacaaatatgagctaggcatggtggcacacgcttgtaatcccagctactaaggaggctgaggcaggagaatcacttgaatttgggtggtggaggttgcactgcactccagcctgggtcacagagcagactctgtctcagaaaaaaggagaggccgggggtagggtggttacactagctgccatgggtagggtggccctgggttacccaggacataggagtttcctgaaatgtgtgactttctgtgctaaaaaggggacagtcctagacgcattaggacagttggtgaccataataccaagaggatcctctccttactctgggcttatgttcagatttaaccttaggaatctgcctttctcctccatccactgaaaccaacactaacacctaaactcagtgggttttgttgtgttttcttagttctggagcatttgactggtgaacttttccttcttgaaattccttggtttctttcttcaccctcagtagccccacaaagttataattttatttcttctaggtggctcatgcctgaaatcccaacactttgggagattgaggcaggtggatcacttgaggtcagaagttcgagaccagcctggccaatatggcaaaactgtgtctctactaaaaatacaaaaattggccagctatggtggggtgcttctgtaatggtatggtgtacggtatggccgggtatggtggggtacttctgtaatggtagggtgtacagtatggctgggtatggtggggtacttctgtaatggtagggtgtacagtatggctgggtatggtggggtgcttctgtaatggtatggtgtacggtatggccgggtatggtggggtgtttctgtgctactcaggaggctgagacacgataattacttgaacttgggaggtggaggttgcagtaagccgatatcacaccactgcactccaacctggatgacagagtgagactctatctcaaaataaataaataaatacaataaataaataaatatataagctgggttcggtggctcacgcctgtaatctcagctctttgggaggctgaggtgggtggatcgcgaggtcaggagctcgagggcagcctggccaatatggtgaaaccctgtctcttttaaaaatacaaaaaaaattagccaggcatggtggcacacgcctgtagtcccagctactatggaggctgagacaggagaatcacttgaacccaggagacagaggttgcagtgagccaagattgcgccactgcactcccgcctgggcaacagaacaagactccatctcaaaaaaataaaaataaaaataaataaaattaaaataaatacataattttctttctcctaacaaattcttctctgtctgtttcattgactcctttgactaccaaattctgacatcaaactgcatgggatcaggtggatctgggttcaagatctagttctttacttgtgagttctgttaacatgacaagttatttgattcccctgaaccttagctttctggtctgcagtactgagttaacaacacttacttacactgtaccataacgactgggagagaaatatttcaaatatttaaggcagctgttggaagaaagcaagccttattaaaaggaagttatagttatgactgtggttcatcatatcttagggcttcaactttcatttccatgcagcttgacagactgcagcctcaagtactctttctacttctatgacctaatttctaattgctgcctttcccaggttgtcttctagctctatcagtgaaaaatactagaggatgaggtggctcacgtctctcatcccagcactttgggaggccaaggtggaaggatcccttgagctcaggagtttgagattagcctgggcaacataatgagacctcatctctacaaaaaattaaaaaattagccaggcatggtggcacacacctgttattccagctactcgggtggatagcaggatcgcatgagcccaggaagttgaggctgcagtgagctgtgatcatgccactgcactccagtgtgggtgacagagtgagttcctgtctcaaaaacaaatttaaaaaattaaaattaaaaatatttaaggccaggcacagtggttcacacctgtgatccttgcattttgggaggccgaggggggtggatcacctgaggtcaggagttccagactagcctggccaacatggtgaaaccccgtctctactaaaaatgcaaaaaattagccgggtgtggtggtatgcacctgtaatcccagctacttgggaggctgaggcaggagaatcgcttgaacccaggaggcggaggttgcagtgagccaagatggcaccactgagcttctagcctgggcaacagagcaaaactctgtctgaaaaacaaacaaaaaaacaatttaaggccaggcgcggtggctcatgcctataatcccagcactttgggaggccgaagcgggtggatcacgaggtcaggagttcgagatcagcctggtcaacatggtgaaaccccatctctactaaaaatacaaaaaattagccaggcgtggtggtgcatgcctgtaatcccagctactcaggaggctgaggcaggagaatcacttgaacccagggggtggaggttgcagtgagcccagatcatgccattgaactccagccccggagacagagcaaaactccatctcgagaaaaaaaaacaacaaaaaaaaagcaatttaagaccaaagctatcatcttctcctcaaactaaatctaagaaacagtgtctcctcctaggtaacaggattctcaggaatccaggttgaaacactcctggctagctttgacttattctctgattcttctgtctccccatccacatctaatcagttccaaatctgactcattttctatggtatggttgttgattttccttcctcttgtattgattcccagtgccactgctcttcccgcttctgcccaccccctaaccccccggctcccatctcagtgtctcataagcttgtacccgggctattccagtagtctttttactgactcctcaacccacaagatcttttgtgcctgcttttgccggattaatttcctaacgcaagactcaaaaagaccttcagaaacaaataaggcacaaactcattggtccgactttcaaggctaaaggttcaagactttcgaaaatgacttagcccacatcatttgattgcttaataagtgcttcttgagtattcagattcaagcaattccttgagaaatactatgattatttcctcaattcaaatcaggattggctgggcatgcctgtaatcccaatactttcggaagccaagacagggaggactgcttgaggccaggagttcaagaccagccttggcaacatagtgagacccccatatccataaacaataaaaattagtcaggtgtggtggtgcacctgtagaccctgttactctggaggctgaggcaggaggatagcttgagcccaacattttgaggctacagtgagccatgattgcaccactgtactccagccttagtgacagactatctccaaaacatttaaaaaatcaggattttgtccccaccttccaataacattcctgtttgcaagttcacctataagcttacattcccaaatccaatgctactctttttttttttttagacggagcctcactctgtcacccaggctggagtgcagtggtgcgatctcagctcactgcaacctccgcctcccaggttcaagtgattctgctgcctcagcctcctgagtagcagggattacaggttcgagccaccatgcctggctaatttttgtatttttagtacagatggggtttcaacatgttggccagactggtcaggtgatctgcatgccttggcctctcaaagtgctgagattacaggtgtgagccactgtggctggccccagtgctactcttctttgcattcatgctatcccacctcttgactgtagggcctcaccctcctttacacatttcctctcctctgccacaaggaatggatcaagaatggttccaaagtatttgatctgagcaaccagaagaatgcaggtctgaatatggaaaggaatgggaatgagctggaaatatgaaaatgggatgcttgattgaggctatagaaaaaggcttaagaaaatattaagaaagacaaaatccagagaggcccatgggagtgtatggttaagatagggtagagacaaaattattaaaggtgaggagattaagaaaatgagctgtgtgtggtaatacatccctgtggtcccagcaactccaggggctgaggcaggaggatcccttgagcccaggagttcaaacccaggggtttgaggccagcctggacaacatagccaagcttccacctctaaaaaaaaaaaaaaaaaaaagaaagaaagaaaagaaaagaaaagaaaaaacgaggctgagggctgggtccagtggctcacacctgtaatcccagcactttgggaggctgaggcaggcagatcagttgaggtcaggagtttgagaccagcctggccaacatggtgaaactccatctctaccaaaaaatacaaaaattagttgggcatggtggcatgcgcctgtggtcccagctactcgggaggctgaggtaggaggatcacttgagccccagaggtggaggttgcagtgagctgaaattgccctgctgcacaccagcctgggtgacagagcaagactccatctcaaataaataaataggctgggtgcatggctcatgcctgtaatcccagcactttgggaggctgagctggtagatcacctgaggtcaggggttcgagaccagctttgctaacatggagaaacccgtgtctactaaaaatacaaaaattaaccaggcatggtagcgggcacctgtagtcacagctactcagaaggctgaggcaggagaatctcttggacccgggaggcagaggttgcagttagccaaaattgcaccactgcactccagcctgggtaacagagcgagactccatcatcagaaaaaaaaaaaaaaaagaagaaattaatattgacattgctagtatctcatattcataccccattcaagttttgccacttagatcaaaaggattcaatgccaaatcaagcattatgtttagtttatcatgttcctttaacctactccattatagaaagtttccttggttagtgcctctgcccggccgccaaccgtctgggaagtgaggagcgcctccgcctggccactgccccgtctgggaagtgaggagcgcctctgtctggctgccaactgactgggatgtgaggagcgcctctacccggctgccaaccgtctaggaagcgaggagcaggcgcctctgcctggctgccaaccgtctgggaagtaaggagcgcctctgcccagccaccccatctgggaagtgaggagcgcctctgtccggccattgtgcaaccttccaagtgtgaagtgacagccttgtgtgtgatcttttctgtcttccccaagtttgcattttcgacattaaagtttactttttaattaaaagttttaaattggagaatatatacataaaaaagaaagattccttggtcttctattgacttttatgaccctgataattttgaagcttgtagttagcttattttgtaaaatgcccttcaatttgggtttttctgatatttccttgtgattagattcatgtagcaggatgatcacagaagtgatgtcgtgtacttctcattgtatggtaccaatggtgcacagtttcaatttgtcccattactgatgtcaaaagacaaaatcatgagtttagttatagacctaattggcttttatttggaatttatgagttaagatagcctctattctacaaaatagaagaatagattggcagggggcaaaagagaagtgggttttgtaaggtgagaacaaggaaacagaacaatagaaataaagctgattgaccaatgtcaagttacttcaggttacttttttcccttttctttctttcttttttttttttttttttgagacaaagtctcactctgtagcccagctggagtgcagtggcatgatcttggctcactgcaacctcctcctcctgggttccagcgattctcatgcctcagcctccacagtagctgggactacaggtgtgtgccaccacacccggctaatttttgtatttttagtagaggtggggtttcgccatgttggccaggctggtctcaaactcctggtctcaaacgatccacccacctcggcttcccaaagtgctgaaattacagacatgagctaccacacccagtccagattacctttttgtaagggttaaagcagaggggacttccttatcatgctgtataaaactggcctgtttagggatttggctatttttctttcctgatttcttggaaggtcagataaacaacttagttttggcttggtttaactccattttggtctgttaggcctagggtaggagcccagtctgaaccaatgccctcctattaagttttatttaattaacactgatgatgttcattttgtataatttttttaacacactctaagaaaccagaataatgttgttgttttagagataggatcttggtctgtcactcaggctggagtctagtgacatgatcgcagttcactgcaggctcaaactcttgggctcaagcaatgatgatgttcagctggatcacatgattactgtggtgtctgcccgctttttcactgtaaagagactctcttttcctttataatgaataactatgtaaatgtcccatcccttcaaactcttaatttactcatgttttaatgtacatctgaatgggctcatgatttctattttagcaaatagattataatttgttactataattatttaatttaatgttcaaatcctgaccacaccggccaggggaagcccattcaagttcacttctgtgtcctttgacagatcctcatcattgttggagtactgtcttgatttctggtacaagatgttccaggctcatcgtgtgcattctcagtcttaactctagaatctgccagctctccaagaagtcctcattccttttagtgaaaaacaatatttagaaaccagatctgagcactaggtgtgttcattgctcatggggtgtcgctgctctcggcacacggagctagggaatagaaatgtatatgcatatatacacatttaaaactatattattcgttgatctctatatatgataaactttaagttttcaccaacacatctaattctggttcaacaattcagaatttatcctagttttccttatttccatagagacctggctgtcattattcttatcgcatttatttatttgatcaatcctctggagtacggctaatatcccatctcattctcccatgtgacaggctttctctcctgtttgagtcctgacttcccatgccagaggctgccctgcttcatggacaacttgctcacctctcctgggtgctgacaccccacatcccttcacctggcatcccacttatgcatcctgcccaggctctgcttcctcatgctgggccactgtggattcctctgtctcccaaccttggaggtctaccatgctcaatttacctaaaaattagagggagggggagaagagagaagggaggtagaagtgtagggaagtgagaagtggaaggcagatgaaggagggaggggagggaatagaagagaagtggggtgggtagaaggagaatggaagagaggaggaagagggggaaaagaaagagaatgaagagggagggaagggtaaagagaagggtggaagagaggaaaggtgaggaaaaatgtgtaatttttaatctctttaaaaaaggcaatggctaggctgggcatggtggctcacgcctgtaatcccagcactttgggaagccaagacaggcggatcacttgaagtcaagagttcaagaccagcctggccaacatggtgaaacactgtctctactaaaaatacaaaaattagctgggcatggtgatgcatgcctgtagtcccagctactcgaaaggctgaggcaggagtattgcttgaactaggaaggcggaggttgcagtgagccaagattgggccactgcactccagcctgggggtgacagagctaaactccgtctcaaaaaaaaaaaagaaaaaaaggcaatgtccaggtgcgatggctcatgcctataatcccagcacgttgggaggccaaggtgggaggatcacatgagtttgagaccagcctggacaacatagtgagaccctgtctctacaaaaaaaaatttttaattagccaaacatggtggcatgagctttagtcccagctaattgggaggctgaggtgtgaggatcccttgagctcaggaggttgaggctgcaatgagccatgtgggcctctgtactctagcctgggtgataaagtgagagtctgtctcaatcaatcaaccaatcaataaaaattaaaaaagcaaaggcaaacatgataaaatgttaagttttgacaaaggctgggtaatggctaaatgagtgtttggtgggttttttttctttctttttttgtatcgtctgtggtttgcttttcatactatgtgtgatagggtttccttcttcttgaattatttccatgccattatggactgacattcttataaatatactaaaaatgaataaatagaaaagtgaaatagcaaaccaaagacatgtaaaatataggctccccaatttttattattagattcaagagacataagattattctgtgaaagcactatgaaattttctaaatgcattctctcaatttcttcgtttctccactgaccagtagtaagagccatgaggagcactgtctgttagcaacccacagtttgagtaacactgtagtctagattttttcttgctcgacatatgacttttaaaaataagatgaaaaacaggccaggtgcggtggctcacacctctagtcccagcactttgggaggccgaggtgggcagatcatgaggtcaggagttcaagaccagcctggccaagatggtgaaaccccatctctactaaaaatacaaaacttagccaggtgtagtggtgggtgcctgtaatcccacctactcgggaggctgaggcaggagaactgcttgaacccaggaggcagaagttgcagtgagccaagatggtgtcaccgcactccagcctaggcgacagagtgagactccgtctcaaaaaaaaaaaaaaaagaaaaaaaagataaaaaacaaagactaagagtctggcttctgcttcgaaaagtcacagctgtgttcatgaatttgtgggtgactaggtgaggccttctgcaggcattcattccactgccaaagcatcctgccaaaataatggtgtttagggactggtaagctgccctgaccttgacttcctggaatccagggatgaaagaaacaaaagagacagagagcagactgggagaaccaaagggacagaagcccaggcagacagaagcccattagaaggctccttacagaacacaaaaacttctaagcagagagaggagatgggcaggccattgtaaagagattactttcaaaaaattgcatctgtgggtctggatcttccccagacaaggcagtctcctttccagtcattcctggtccatgagcctgagtaacttggagtgttggcagctactctgaaaaccacgcctttggctccacgttttgcagacagtgactaccccctgagagccttgtctcctgtcatctgtgtggagattctgcagtccccattgttctgggatcctgtaaacaaaatcacagtggaagaggggagataaagaacagatgtgaccagcacatctgaaatacaaaacaaagcacgacagaaaacaagggcgctgcacagttttctccacagtggggatcaggtttctatggggtttgacttcgccttggcacagggcgctctgagtgggtagtgagcgtgctcagcacaggaagaaaggggctctctgtggtgttcattttgaaggtttatgtttttagagcagccattttgatttgaaaaatgtgtcagcttaatgccttctccccaggggcctgaaagaccatttctttaagtgtgaatttcccagcaaaatatttactagatttttgggctttttttttttttttaagtatagttaacctggaattttccctaatagttagaagtgtttttttctttaaatgaaccctttagcgcagtcgtgtagaaaatactattcttcatatttcctctgctagaaggctttatgttgcattttccttcccccaatggcatttttatccatgcctgacaagccactttgacaggtggccctgggaattctctagaggccaggatgaggtctggataccattcctgggtggtctgagagcagggtatttaaagctaacttttcacattctgggtctggaattgtttctgaatccattcctcagaggtctgctgcttgttctatgagacttttccttccagtatatgaactgggattttggctgcatgtgctcattaagaaaaccatgtcacttgtctcaagtgtaaaaaagagtgtttcaaatgttcctggaaaactttcagctggtctacctccatgcctaggtccttcttataatttcccgtattcctccctgcccgggttgtccatcagagttatttctgaggcagaatgactgccatggttcagccaggcagactggctgcctgtaggtgatgggtaaagtcattgatttggatgactgactgacactgtagagttccttagagaaggggctcaggggtgaggaaggtgttcctaggctggatttctattagtgtggccaagacagaagatttataacaacccttcaaggatttaatacccttttgtggatatgatcccagaggatcttattaatgcagaggctcattctaaagcgaagaaactcaatagacataaaagcaggggggaaaaaacctagcctttattcccaaagatttacttaggatggaatttttttttcttttttttttgagatgatgtcttgctttactacccaggctggagtgcagtggcacgatctcagctcactgtaacctccacctcccaggttcaggcagttctctgcctcagcctcccaagtagctgggattacaggtgcccaccaccacgcccggctaatttttatattttcagtagagatgaggtttcaccatcttggccaggctggtctcgaactcctcaccgcgggtgatccacccgccttggcctcccaaagtgctgggattacaggcataaaccaccgtgcctggctaggatggaattttttttaatgaagccccattcacgtgtaatttcttaaatgtttttgagcctatttacctaattattttatcttctattttttaattgacaaataaaaattgtatatatttatggcatacaacataatgttttgaaatttggagtggctaaatcaagctaattagcctatgtattaccttacgttatttattataatttttaattgaaaaaatgtttggtgtgatccttttggatttgttgtcagcatcagcatggctatgaacatacacaactaagcacttagagactgttctgagttcttcaggatatttttttctgttttttcctttcttttctttctttctttctttctttttttttttttcttttgagatggagtctcgctccgttgccgaggctagagtgcagtggtgcaatcttggctcactgcaacctccgcctcccaggtccaagtgattctcctgcttcagcctcccaggtagctgggactacagatacctgttgccatgcctggctaatttttgtatttttagtagagatggggtttcactatgttggccaggctggtcttgaactcctgacctcaagtgatccacctgcctcagcctcccaagtgtagggattacaggcgtgagccactctgttttttcctttctcatctattttgtgaaagaaggtagtcctaaagttatggcactgggcaacaccgacctcaggggattaaggactattaacctgcattcaaaacaatatcactcttctttaaaataaataaataaattgaaacagggtctcactctgttgcccagtttggagtgcagtggcatgatcatgactcactgcaacctagacctccagggctcaagcaattctgccacctcagcctcccgagtagttgggattacaggcgtgtgccaccatgcccggtaaatttttgttttttgtttttgtctttttatatttttttttggtagagacagggttttgccatgttgccaaacaggtcttaaacacctgggcccaagcaatccaccacctcagcttccaaaattgctgggattagaggtgtgtctggccacagtatgactcttaagggaatgaaaagacaagactgggagaaattctttgtaaaacatgtatctgataaagaatttaggccaggctcattggctgatgcctgtaatcccagcactttgggagaccgaggtgggtgggtcacgaagtcaggagttcaagaacagcctggccaagatggtgaaaccccatctctactaaaaatacaaaaattagctaggtgtggtggtgggtgtctgtaatcccagctacttgggaggctgaggaaggagaattgcttgaacctgggaggtggaggttgcagtgagccgagatcgtgccactccactccagtcttggcaacagagcaagactccatctcaaaacatatatatatatatatatatatatatatatatatatatatatatatatatatacacacacatatatatacacacacacacatatatatacatatatgtgtgtatatatatatatctgataaagaatttgtatccaaaatataccaagaacccttaaaactcagcaattaaagattttaattaaaaatggacaaaagagctgaacagacacctcacaaaaaaagatatgcagatggaacaaacatgaaatgatgcaatacattatatgccattaaggaattgcaaattaaaacaacaatgagatatcactgcacacctattagaatggtaaaaacatattttaaaaaacactgacaccaccaaatgctgggtgaggatgtggagcaccaggaactctcattcattcctggttgtaaatgcaaaatggtacaaccattttggaggacagtccggcagtttcttacaaagctaaacagtcttactacatgatctagcaattgtgctcctgggtttttacccaaatgaattaaaaacttatgtctactcaaaaagttgcacattgatattcatagcagctttattcataattgcccaaaactggaaacagtcaagatgtcctttgagaagtgaatgagtaaatggtagtacatccataaaatggaatgttatgtgatgataaaaaggaaatgagctatcaactcatgaaaagacatggaggaaactcaaatgcatatttctaaaagtagctagtctataaaggctacatatacatactttatgattccacatatacgacattctggaaaaggaaaagcttagaggcagtacaacgatcagtggttgccaggggttggggaggagggagggaggaatggatgtgggtgaagcatcactattctgtgtaatattacagtggtggatatatgatggtatgcatttgtcaaaacccatagaactgcacaacacaaagagtgaatcctaatataaactatggccttggccaggtgtagtggctcacacctataatcccagcattttgggaggctgaggcaggagaatcacttgcggtcaggagttcgagaccagcctggccaacatggtgaaactctgtctctactaaaaatacaaaaattaatcaggcatagtggcacacaacctgtaatcccagctactcgggaggctgaggcaggagaattgcttgagcccggaggcggaggttatagtgagctgagatcgcaccactgcactccagcctgggtgacagagcgagtctccattaaaaaaaaaaaaatcactatggcttttgttaataacaatatattaatatgggttcatcaattgtaacaaatgtactgcattaattcaagatgttaataatagggaaaactaggggaggtgggagtatatggaaactctttgtactatctgctcaatttttatgtaaacctaaaactgctctaaaaagtaaagtctaataatttttttttaaaagagactcaaaatgatcagtttcatgatgaagggaaactctgtcttctactatatctcatatctttgcttgttcctcaagggccctggtctagcttgttaaccatcgtattcccaatggcacatagatgctcaataaagactgctaaatcagtatgttcaaaaggcttagccattaaaacctgctcttggctgggagcagtggctcacgcctgtaatcctaacactttgggaggctgaggtgggtggatcgcttgaggtcaggcattggaggccagcctggccaacatggtgaaacactatctctacaaaaaaatacaaaaatcagccagctgtggtggcagccacctgtggtcccagctacttgggaggctgaggtgggaggatcacttgtgtccgagagttcgaggctgtagtaagctgtgataacaccgtgatcagcctgggtgacaaagtgagatcctatctcaaacaacaacaacaacacttttgttcttatcactttatactctgtttgacagacagaacttgaccaagcacaaaccactgaattattagttattatgtatggaacatttaatgtgtatcagccatttttctagaatcttgacatgtagtacttaataattcatttactcctcatgagaacctggtgaaatggtacttgttttacagatgaggaaacttggccataaagagtttaaataggccgggtgtggtggctcacacttgtaatcccagcactgtgggagtctgaggcaggttgatcacctgagtcaggggttcaagaccaacctggccaacatggtgaaaccccatttctactaaaacacacacacacacacacaccaaaaattatccaggcgtggtggtgcacgcctgtaatcccagctacttgggaagctgaggcatgagactcgcttgagcctgggaggcagaagttgcaatgagccaaggtcatgccactgccactctagcctggtcaacagagcaagactctgtctccaaaaaaaaaaaaaaaaaagagctaaaataacgtgttcaaggttacagaatctgtgagttatagagccaggattcaaacctagagagtctagctccagaggccacactctttgacaactcactacaataaagctgtgagaataaagacgtgtacttcctcacttaaggagatttcagtataccaggatagtgaggcatgaagactacagactattgtagagagggctgatctctgtcctctggagggctcaccaagcacagctctaatggatacacctcagcggggtggcttgtttatctacatcctgagcctagttttcccttcagacactatcacagtcgacattacttactgatcctttcttctgtgttcatcatttcccccaattagactcagactccttgaggtcggggatgacttcttataattggctctctacctgcatggtgaatggttgtcttagtcagttcaggttgctataacaaaataccttagactgggtaatttataaataacagaaatttatttttcacagttctagaggctaagaagtccaagatcaaggcactggcaggatccctgtctggtaagggctgctgtctgcttccaagatggcaccttgttgctgagtcctcacatggtgaaaagagggcaaaagacccagggagctttctgaagccttttctataagggtattaatcatattcatgagggctccatcctcatggcctcctcacctcctaaagtctctagctcttaatactatcacattggcaattaagttttgacatatgaattttgggggacatattcagacactagtagtggttaataaatacttttggattgattcactgttgggagaacactcaataagagaacaaattcaagtccaattttgaataaaaatagagttgaaaagttattgggtttgtgtttgttttttaggatgtttggtagcagatttccactttatttacatttggttaactgtgaagtcatagtgtttgatgttagccatatctttgatggcccattagggggcaaatgcttgtgtaaaccattcatacaaaagcagagaggggtccccactggatcccagagttaaggggtcaggaatcaccagacttggtggaaggggtcaatcttcggggagttggagagctatgttttagcctaatatcgtcactggtgctgtgtctggggtaggtcatttaacttctctaagcctcagttttcccatccatgacatgaaaggtctcttttttgtgggggtggacagagtctcgctctgttgcccaggctggagcacagtggcgtgatctcagcttactgcatcctctgcctccctgattcaagcgattctcccgcctcagcctccaagtagctgggattacaggcacacgccatcatgcctggctaatttttgtatttttgtagagacagagtttcaccatgttgggcaggccagtcttgaactcctgacctcaggtgatccacccgcctcggcctcccaaagtgttgggattacaggtgtgagccaccacacccggccaatgtgaagataattttacctgccctgcctactttttgtgtcaactgagattttggtaagtaaaagatcaggatgttatgtaaattgagagagaacatggtagaaaaggatagtgattaaatattttgtacttcatttgacattaattctgcattagaggcttattgtttgaaacagggcattgtataaacaccttttttttgctgttgcaggatatgttaagggcttctgaaagagggttttggtcatctgggttagctgttgaagaacaccaagtgaatgtcctcttttctctctaaataaatttccctctgctgggcatggtggctcatgcctgtaatcccagcactttgggaggcagagatgggaggattgcttgaggccaggagtttgagaccagcctgggcaacataaggagacccccatctctacaaaaaatgaaaagaaaaattagctggtcttcatagcacacatctgttgtctcagctacttgggaggctgaggtgggaggatcacttgagtccaggaggtcaaggctgcagtgagctgcgatcgcaccactgcactccagcctgggtgaagaggaagaccttgtcacacacacacaaaaaaaacataaaaataaataaaataaaataacatatataaaacatccagcccagtgtctcacatgtagtaagagtttgctggttgttatcgtttcacatgacagccatgttaggtttatttgcatatatgccagtcagtcctatttgattataagtcccctgggggcaggctctgagtgtacttatctttgtctttcttcttctggaactgagaactccctgaaggcagggactgtttcttattcttttctttttttgtttttttttgagacggagtctcgctttgttaccctgactggagtgcagtggtgccatctcagctcactgcaacctctgcttcccgggttcaagtgattctcctgcctcggcctccttaatagctaggataacaggcgtttgccaccatgcccggctaatttttgtatttttagtagaaacagagttttaccatgttggccaggctggtcagttcaggttgctataacaaaatactttagactgggtaatttataaataacagaaatttatttttcacagttctagaggctaagaagtccaagatcaaggcaccggaaggatccctgtctggtgagggctgctgtctgcttccaagatggcaccttgttgctgcgtcctcacatggtggaaggagggcaaaagacccaggaagctttctgaagccttttctataaaggtattaatcatattcatgagggctccatcctcatggcctcctcacctcctaaagtctctagctcttaatactatcacattggcaattaagttttgacatatgaattttgggggacatattcagaccctagtagtggttaataaatacttttgggttgattcactgttgggaacacctgacctgaacacctgacctcaagtgatctccccgcttcggcctcccaaagtgctgggattataggcataagccactgcacccagcccatttcttattcttgtagatatttgttcttagcaaacagcaggcacatggtaagcaacatagaaactaggttgaatgagtgaatgaatgaatgaatgaaggagtaaatgaatggatggaaacccacaaaaatgaagagaatggaaacccaggaatagagtgtgattccatatgcctgttatttttgcttgacattaattatcagatcttctctgctaggatcttggctgacatgcatttgctggagttgactggattatataattgctgttttctgtctctgctgtgattatgactgaaacagtggatacatttacggtgctacataaataataattattttaattatggtttgacctgtacaacatattctagcaacgtagctgactgtgcatttgtgtatgtgctcccttgagagtcctggagaagactcctattatgagggtacaaaggaatctcccctctatgcacatggtaattttacaattataacatggagaattacaataccactgtaattatagcaagttttcagaacaaaatggctttgaaataatatataatctagctgtattgtacatatgtagtataaaatttaacaatattttatttttggtgccaggaaaaatggatgtatggccatttttccagcttcctataagagtacaaaagtgacttataaattttaagtgagacttaagcaacatgatttgtgtaacatgcttaactaagtgcccagcatgtagtaagtgctcagtaagtattaggtaactgaacttaactaacaacaatgataaaaaaaaatcggtatcatttggtcatagtgtatctaagtaagcatttgatataaatgatggtgtctctgcattttaaaaatgatcctagggaactcagatttggtccacatgccacctgtaggccctcaccaattcagcgaacttttttttttatcccacttgtactgcataggggaccatgctaggcactggaggggttgaagaatggtttaggcccatggagcccatgggtaggacacaaagataaatatgataataactgctgctatgaaactgacaatgtagtgaaagagacaagacagtcatggaataatagaattctcactgagcacttactacatgtcaggcagtactctatgattttactcatgaaaaatcatttaatcttcacagagacaaggaaacggaggcatagagagttaaatagggtgttacagataagcagcagttgagattccaactcaggctgtctgatcagagtctacactcttgactgctatattatgttttcccctttacacctcacacctttagtgtgcaaatagcagttatataaatataatttgcagagaggggtaagagaactactgtgggtacattacagccaagatattgggactacttctccaaggagtgagattgagtaagaaagaacagctgcctagaggttttgactgacactccccatttccaccaagtctggggtagactactcctatgggatcccacaacaactataattacccctatttgagccctaagtacattttactgcaattgcctgtttatctgtctcttggccattaaatatataagctctttgacctgcttggacatatttgtatcctgagcattcaggagaccctcaagagttcactgagggctgggcagagtggcttgcacctgtaatcccagcactttgggcggcccgggcgagaggacctcaagcccagaaggttgaggatgcagtcagatatgatcatgccactgcactccagcctggatgacagaatgagaccctgtctcttaaaagaaaaaaatttactgatatgaactgtcaccatttttttccctgaaattagatgttttacacaataaaatgaatacagttaatttaaaagaccagatgccttgcagaaatgctcatttatatagtgctaagatttgttgagcatgtagctcaggatttgaaacagttttgtggctaaaaatcagtaggattactggagcaaaagtaaaccttttaaatgcatatgtcatggaggatgaatgtttcccaattatctggaaagttaatatggcattttaaatgaaataacaataaatcctccttctgctctcatttgaatgctctgtgcttttctattctattcacacataaaggatgttcagcctttccagtccagtaggaaatacatagccatggttgtcagacgggtgctatttaattgagtagacaatagagggaaaccaggttcacacaagagaggatgaccatatttcagaaatgaacaaaattaacaatttatgataattaatgtattctcaaattccttccaaggaatactatttttcatgttatcaaattctgcctccattgttattgaaatgttagaatattagaagcatattctttctcacaccaaagttactggcttcaggatctgagtcagctgatttctaagggcactctctcctggaaaacattagggtgctttttggagacatggagggctatgcgtttatttttaaaaattcatttcctaggccaggtgtggtggctcacacctggaatcccagcactttgggaggctgaggcgagttgatcatctgaggtcaggaattcgagaccagcctggccaatatcttgaaaccctgtgtctactaaaaaatacaaaaaaatagctttgtgtggtggtgcacacctgtaatcccagttacctgggaggctgaggtaggagaatcccttgaactcgggaagtggaggttacagtgagccgagatcgcaccactacactccagccccagcaatagcattaagactctggctaaaacaaacaaacaaacaaacaaaaaatgtatttcctagaagacacaaaccctcccccaggacttaagccatactctgcttcttcaagagccctctttgggttccccctgatgcttttttctcgaggctcctggctcacagacaagctctgagctgcctgtctatgcattgcttggtctgccactcaggcccttaccatgtccacttttggcaatgtttttcatgcatcttcagtgagtgtcaaaactccatccccaaaggtgatatttgacattattttggctgggcacggtggctcacacctgtaatcccagcactttaggaagctgaggaggaaggatcccctgaggcaaggagtttgagaccagcctggacaacacagtgagactcctgtttctacaaaaaaaaataataatagtaacaataattagctgggcatgatggttcgtgcccatagtctcaactactagggaagctaaggcaagaggattgcttgagcccaggtcaaggttgcagcaagccatgatcacaccactgcactccagcttgggcgacagagcaagaccctatctcaaaaaaaagaaagaaagaaagaaagaaagaaagaaagaaagaaagaaagaaagaaagaaagaaatatatatatataacacattgtctgaaatagactggattcattcattcgttccttcaaaaaacatttgatgaatgcccagtatatgccaagcactgtctggcaggcacaggcactagagtggcttatgaagtagtgaggctccttgttttcatgaactttatactctaaagagaggaacaaacaaaaaaaccaagcagatgagtatgtacctataaactgtgatgagtgccatgtggtagccctatgatgagaataagaacaggaaggaggggtcagggacttccttcctaaggacagacattaaatctgagataggaggggtagggaggaaggctagcgaaagggtgggagagaaggtgaatggagaaaagttttccaggcagaggaaagcagtgtgcagatccagaggtgggaaagagcttgatggattttaagaaggaaaagaccattgtagtaaggaaaaagagtggtatgagatgacattggagaagataggcagagccacatttaggtgtctgggttttgttttaaattcaatgggaagccatcgaaggccactaagtaggaagtgacactaatcagatttacgaaagagcacactgcccatgagaatggctaagattaaaaagacatcaaatgttggcaaaaatacagagcaaatgcaacattcatatctttccagtaagagtataaattggtataactacttgggaaattggcaatatctacttaagtatgcatatcccatgcccatcaatttcattcctaggtatatttcaacagaaatgcatacatacactcaccagaagaaaggcatgagaatactcatggcaatattattcataatagtcaaaaactacttgaaaactactcaagtatccatcaacagtagaatgggtaaataaactgtggtaaattcatacaatgaaatacttcccaggaataagactaaacaatctacaactacaagcaacaacatggatgaattgcatcaacaaaatgttgaataaaatatgccaggtacagaagaggatgcatgggatgattctacttacataaagttttaaagcaggaaaaaccaatcttatggtgttggaagttaagatagtggttccccaacccaaatgctcatcagtgacagaccgaataaagaaaatgtggcacatatacaccatggaatactatgcagccataaaaaatggtgagttcatgtcctgtgcagggacatggatgaagttggaaaccatcattctcagcaaactaacacagtaatagaaagccaaacaccacatgttctcactcataagtgggagttgaacaatgggaacacatggacacaaggaggggaacattacataccaaggtctgttggagtctggggggctaggggagggatagcattaggagaaatacccaatgtagatgacgggttgatggctgcagcaaaccaccatggcacgggtatacctatgtaacaaacctgtgcattctgcacatgtatcccagaacttaaagtataataatcataatagtaaaaagatagtggttcccttggaaggagggagtgtggaaggggcgtgagtggatgtctgggatgctggtcatgtcttatgtattgatctggcattggtcacatgagtatgctcttttatgtaaaaccactgagttatacaatatggtttgtgtttctttgtatataagttatatttcaataacatacatataacttgcataaaaaataagactttattattatttttttttttgagatggagtttcactcttattgcccaggctggagtgcaatggcgcaatctcggctcactgcaacctccacctactgggttcaagcaatacttctgtttcagcctcccgagtagctgaaatttcaggtgtgcaccaccacgcccagataatttttatatttttagtagagacggggtttcaacatgttggtcaggctggccttgaactcctgacctcaggtgatccatctacctcagcctcccaaactgctgggattacaggcatgagccaccacacccggccaaaaataagactttatgttttaataagggtaccccctgattgctgtgtggagaatgaattgccaaaggcaggagttgatgtaggtaagcaattggaaggtgattccttgagagaggaacctcttgagattaggtggatgccgtggagcaacagaggagtagacagatttgagagactcttggaaagtaaaaatcaataaaactcgctattggctgggcacggtggctcacgcctatagtcccagcactttgggaggccaaggcaggtggattgcttgaggtcaggagttcgagaccagcctgaccaacacggtgaaacccagtctctactaaaaatataaaaattagccaggcatggtggtgcacgcctgtaatcccagctactcgggagactgaggcaggagaattgcttgaagccaggaggtggcagttgcaatgagccaagatcatgccattgcactcaagcctgggccacagagtgagaatccgtctcacacaaaaaattaaaaattaaggccaggcgcagtggctcacacctgtaatcccagcactttgggaggccgaggtgggtggatcatgaggtcaggagatcgagaccatcctggctaacacagtgaaaccccgtctctactaaaaaatacaaaaaattagccaggcgtggtggcggacgcctgtagtctcagctactcgggaggctgaggcatgagaatggcgtgaacccgggaggtggagcttgcagtgagccaagatcacaccactgcactccagcctgggcgacagagcaagactctgtctcaaaaaaaaaaaaaaaaattaaaaattaaaaaaaaattaaagtggctgggcgcggtggctcacgcctgtaatcccagcactttgggaggccgagatgggcagatcacgaggtcaggagatcgagaccatcctggctaacacggtgaaaccccgtctctactaaaaatagaaaaaattagccgggcgtggtggcgggcgcctgtagtcccagctactcgggaggctgaggcaggagaatggtgtgaacccgggaggcagagcttgcagtgagcagagatcatgccactgagctccagcctgggcgacagaccaagactccatctcaaaaaaaaaaaaaaaaaaaaaaaaattaaagcttgctattggcctgaatgggagttaagagaaaaggaagaagaaagtaaactactagatctggagtctgggttactgaatggtggtgttatcatttgagatgggaaagtctaggggataatcaagcttgggtaaaaatctacagttcaggactcaaggcttcccatcatgtctattggtgcaaggctgattttagaggaaatggagaaaatcaaaatgactcagaacacctatagctttgccagctttgacaaggactctctggacaaaaagagggaacattcacattctaaagaattttcttcccaggatttcacagtctctcctccaactcttctccactcctttagctctggatctgacaagcaaactcctgccaccagaaaagtggtgaggatatccttgcattcctctctctgccagaaagtggaaaattcccgtgtcttctttttaggtcagagagtgttgcaattaaagagaagacttttcctaggataagaaggtaaggaaacaaaagtaccaaccagagaaaacaaagtggaaggaaaacgaagagtgttttctgagctgccggggttctgacccgaacaacacaatgttgaaagagctgcgatgctggagctgcagggtgcaggcgggggtgtccagggcaaggcaggagagggcgtcggggatcctatattatatggtaggcatggtaggttctgcagaggattccggcactcaagcttatagtcattgaacaactttgaataacacagtgtggtctgcatttcagaaggatccttatggtaagattgtggggggtgaggagaagaggtgaagattggagttgggagatgcagttaggaggctgtgaccatagtctggacaagagaaggcaaggacttgaactaaggccctggaggcaagaaggaatgaaagaaagacttggtgccaagaatgatttgggaagtcaatctggagatttcccagtttagggaactgggcagattctgatggggaggggaatgggctagtcaaggacaacgtccaagctgaagggacccttggaactgtgacatcaacaactgagataatacaggacaagaaggaggtttacaggagcttgaataggatttgttgactcctatgatctggtgagagcctaaatcctgtttctgcaaaagtcgtcattgttctggtcaatcgatgccccacccaggcactgagtcactggttccatgcatttgttcatatgctaatttgttcataaagttctgggaaattactttctatttcttatctccttgctgtttcttcctggtcaccaaatactcagccttgcacgtagaaggtactgtatccaaattaccttttgaatttagtggcttttatacagtttgaaccataatgctaggaaaaggacacaggaagccaggcgtggtggctcacgcctgtaatcccagcactttgggaagtggaggccagcagattgcttgagctcaggagctagagaccagcttgggcaacatggccagaccccatgtctacaaaaaatacaaaaattagccaagtgtagtggcacatgcctttggtcccaactacccaagaggctgaggttagaggattgtttgagcccgggggttgaggctgcagtaaactgtgactgcgccactgcactccagcctgggtgacagagcgataccttgtctcaaaaagaaaaaaaaaaaagacaaaggaacactaaagcccaccccatttagatgagaggagaaaaagaatgttttcctttgagttctttggttagcaactctgtccccattatgtgcacataagttatttcaaatggcaaagagcacaatgatgtttgagatatcattgctgagagccaggagggtccctgttctttccttatctgagtatgacagtagcttgagtaaatcagtgacctctgctactcagtttcttttttttttttttttttttttggagacagagtcttgctccatcaccaggctggagtacagtggtgccatctgggctcactgcaacctctgcctcccaggctcaagagattctcatgcctcagcctcttgagtagctgggattacaggtgtacaccgccatgtcaggctaattttttttttaaattttagtagagacagggtttcaccatgttggccaggctgatcttgaactcctggcttcaagtgatctgcccacctcagcctcccaaagtgctgggaccacaggtatgagccagtatgcccgaccttctactcagtttctgtgtgcaaatggtgatagaatgctgccctttctttccgtggctgtgaagagcatcaaataagctcatatattcagatatgctttggaaggagtaaaatggcattggaaataccgggccatgtaaaatggaatagcaaaactaaactgaaaggaaatgacctgtatacttctattggtccatctggattttggaagtatcagggtaattgaaatatttatttttcattcaaccttcaggtaaaatgtagacccagctggtgtttatcctctaagtggtgtgtgtaattgcacgtgtgacacaaggatgagctatttgtcacacagctttagaatgaaacttgaaaaggtcacagagagggctgtgaattttaagctgtgctccaagatggagtgctaagcagcacctatcagaaaagctcttcctttgtcctccaggtggggtgaagagggaactcttgaatctccaatgccactttctcaggttctattggtggcttcagtgaaagcaaacaggactcagacaggcagataagataaccactatctgaagtgtgagcctgcagttttaaattgccttttatttggaaataccttcaatctcatttggatgctaagggaaaaacttaaatctatcacacacagccctagacaacttgtttattaaatgtgcagaataaagatttgatgcgaacttctatggcaataaactaggttcatgggtgggtattaggttaaaccaaatgaatcgctgacattcaagggatttttggctgcaacagttacacaggccagaactgcctaatctaatccaggttctgtcactggcaaatgcgaatcacctacaggaatctttgacagaatttatattagtcattccttactttttgtgtgtgtgatagtctggtgtgtctctaattatctcaaaatgtattgaagtatatcttaaatcaagtttactttcatgtatctttacaaataaaaatatgtcattgcactcttatttagtacaatacgtgttagagaatgaacacaaagcttggaaatcatcacgatcatgcctgaatttgaccagaatagagacaggcattaaatccgaattatcaatatttgtgtgtgtgtgtgcgtgtgtgtgtgtgtgtgtgtggtgctactggtgtctgtagcaacataactcaaccacaaatacatgaatcttgtagttggataaatcatttttgttcagccaacctttattttctcaagtgaacaaaatgcagcttccctcaataatatcaggtttttcacagggctgccatatgatattatttgataataaatattttctataatgcatgcttgttttagaatgttatttttatggaagagcttcagaaagttaaatcttttaattccacaacgaaggctagtctgtcaaaatactgttttttgtgataataaatgcaaaacctactatgccatttcttaccagcagccaagatttttttttttttttaatgtttgagaatttcagcagttgatgcaaagtggacattatgagccacggatctatgttacaggagccaattttagacattttaatttgagtggaatttaagttcagctcctcccttatctctttgaagttgctggggccctgttgcattttaaatctactcaaaagtgcccataggagcaagactcaccagtcgcagccactgatggagttcatggccacccctctccctgctcctgtccctatgcctttgttcatgcagttccctctagaagaaacacaccactggtcgttcttctctctctctctttttttttttttgagacggagtctcactctgtcgcccagtctggagtgcagtgaaacgatctcggctcactgcaacttccatctcccaggttcaagcgattcttgtgcctcagcctcccaagtagctgggactacaggcatgcgacaccacacccggctaatttttatatatttagtagagacggggtttctgcatgttggccaggctggtctcgaactccttgcctcaagtgattcgcctgcctcggcctcccaaagtgctggcaatacagatgtgagccaccgcgcccggcccgttcttcttacttttttttttttttttttttttttaatgagacacagtctccctctgtcaccaggctgaaatgctgtggctcgatctctgctcacggcaacctctgactccctggttcaagcgattctcctgcctcagcttcccaagtagctggtattacaggcatgcgctagcatgtccagctaatttttgtatttttaatagagacggggtttcaccatgttagccaggatggtctcgaactcctgacctcgtgatccgcccacctcggcctcgcaaagtactgggataacaggcgtgagccaccgcgcctggcctggttcttcttactcttaaagacagctcagacagcagcccaagaagccccccgccccgccccccaaatctcttagtttgggtaaagcgccccgattccgtgtggtcatggctttatatttgtccctcttcctgttcaaataacttgtgcgcctatatagggcctggcccgcggtggaatggacgcggctgcagctggaatcgcatcactccctcctcccctcccccagcactgacatacgagccccagtgtcctgaggatgactccaaacagcgtcggaccttcaagtggaacctcaggcttgttaaggagtggcctggaactgcaccagattttaggggtgcctggggaggcttagagatgggagacgccctgacttggttcctttccagaacatttgggaacacttggcttggtttcagtcaccaaatgcggactcgcccagggtggacttagttctgaggtggcctcttgctccctctagtggtttagaaatcactgcaggcgggttaaagacgggtctggtttttctccgaggaggaatccgcattaaccatttagacatctactgcgcagtgaagtcaattcatgactacgtttttgagcaatccaataattaaccaaatgcacacacaataaggactttggaccgtcttgtggatccttggaggaccttgggttcattttacaatgcaaacctaacaggctgtaagtacccaagggataattgaaaatatgctttaatcaaaggcaatcaccctgtcattgtcagcctgtgaaacattagctcgtggagcgggatgagagcacgcagttctcttatcgctccaagataactccaccaggatgacagaaaagcatcagatttggagatgtcaccagtctggagtctcagttacattcaaatttcatgatagcctatccttggggaactgaattgtctcttttgaacaaagacaatttcttagttgagtgagttcagtcattttttgattcaatatcagatcattacagttcctttgggacataaaaactatcgtttccagaggcagaggagtgtactttgctatgtttgtacctgccctacacacaaacttcttatgcaacatacattttctgaatgacttaaaaataatagctgaatatggcatctttcttcagaattgcacgaagctttaaatatcacctactgtggggtgcagcggcgcatgcctgtaatcccagcactggtaaggctgtaatgggagaattaggctttgattttcggagtttgaaaccagcctgggcaacatagggagacactgtttcaattataaataaataaatatcacctcctcagagaagatttcctgaggcagcagaccagcttgggcttcccacagtgacgatggcctcccacagcactgggtgaccacagagcactagtcacgcctgccatttaatgagggcctggtttgttttccgtctgtctcctctgtccaaagctgagctccgtggttggttgtttgtccatgacagcatgccagagtctagcgcagtgcctggtataagaggtgctgaataaatatttgtcaactgatacaatctaggggggtaaatgctgaggagacagacagcagaggagagctggtgctgttttttttttttttttttttgagacagggtctcactctgtcacccaggctgaagtgcagtggtgccatctcggctcattgcaacctccacttcccaggctcaagcgattctcctgcctcaggctcccaaacagctgggattgcaggaggtcaccaccacacctggctaatttttgtatttttagtagagacggagtttcaccatgttggtcaggctggtctcgaactcctgacctcaggtaatccacccgcctcagcctcccaaagtgctaggattacaggcgtgagctaccgtgcctggcctgattcttatcttagggctgtgagggaacccttcattcagattataagcagaaaaaaatacctgattaaagactcaggaatagtgaggtgaagggctgagattagcacccaggtggccagtgcacatctgtaaccacagtgcagcgaagaggagagaagcccagaattcccccactcagatcccaagtcaagcaggaatcaccatctcctggctcgtggagctacatttctttgtcaacggcctgatggaaactggcctaagctctgggggatggtttaccagcaggactgtcctattatcttaatatgtgtgggatgtttaccttaacaaaggcattttttttttaaacaggctggagtgcagtgacatgatctcagctcactgcaacctcagcctcccagactcaagagatcctcctgcctcagcttcccgagtagcagagatggcaggtacatgccaccacacctagctaatttctctacttgtaggtgaaatggggtttcaccatgttggccagggtggtcttgaactcctgacctcaagtgatccaccctccttggcctcctaaagtactgggattacaggtgtgagccaccatgcttggcctctaaaggcatatttttaaagcactgaaaattaaacaataacaaaatacctggaagctctggaggcaacaaagacagaaggccaaaagtgtgcagactgtaagaatagaatacagagtaagggtaagactataaagaggaatgaaaatatgaggccaggagaaaagatacggaaaagagaacgaatgtgttccttcttgtgtgtccttcagctttccttctgtatcactgactatccaaagaaaaatttagttaaacaggcagcaagtatgaattgaatgctgggaaagacacacatacatttaaaatcccacaggaaagttataaatgtgagtaggtcagcagagaggcacccagccttggtaggcctcctgggatgttatgtagctgggtgtgtgttttcagccctgctataccccagatttcatttttgagtgagggtgattgcatttggagttagaatgagtaaaccatttttgactttattagttaggattgttaaggttggctgtaagtaatagaaaaaaaaaatcaaaataagtggcttaacaagagagagagaaggtagaattttaggccaggcactggcctaaatttgtggctcgcacctgtaatccaagcactttgggaggccaatgcaggagcccaggaggttgaggctgcagtgaaccatgatttcaccaaggcactccagcctggacaacagagtgaaacccggtctcaaaaaaaaaaaaaaaaaagaggccaggtgcagtggctcacgcctgtaatcccagcactttggaaggccgaggcgggtggatcacctgaggttgggtgttcgagaccagcctgaccaacgtggagaaatcccgtctctactaaaaatacaaaaaaattagctgggcgtggtggtgcatgcctgtaatcccagctactcgggaggctgaggcaggagaattgcttgaacctgggaggcggaggttgcagcgagccgagattgcgccattgcactccagcttgggtgacaagagcgaaactccatctcaaaaaaaaaaaagagagacaattttctctctgctggcatggccgactcatgagggcatctcagaaagacaagaagcccaagaggtcaacctggaagtttaatttggaccttactcatccagcagaagatggaatttttgattctggaaattttgaacaatttctacgggagaaggctggatatctcgggaatgttgttcacattgaacgcttcaagaataaaatcacagttctttctgagaaacagttctctaaaaggtatttgaaataccttaccaagaaataccttaagaagagcagtcttcatgattggcttcgagtggttgcatctgacaggagacttacaaactttgttacttccagattagtcaagaagatgaagcagagtcggaggactaggcaaaggcttcccttatagggctttgctgattaataaaataaatgaagtatatgtgagaaataccaagaaattggcttttagtttatcagtgaattttaaaaaatgcacccttaaaaaaaagagagacaattttatttctgttacattttcaagaaggcaggaggtagcttatcaaggtttgtttggggcttaagggtgagggatcttctacttggtagtaccacagtgctcagtttcccttttcaaggtggcctcatagtctaaattggctgctgaggccccactcacacacctgctttctactcagcaagaagaccagactgagaaggatgcatcctttttttaaagacgctttttagcagttgcacccacaactcgtgcttacatcttgttggccagaacttttcttcatgacacatcgacctgcaaaaaagttggtgaaaggaagacttctgttccggggggaaaaaaaacaaactaaaattaaaaatcaaggactctattactgagaaggaaaggagaatgattactggaggccaatatgcaatatgcaatctacttcactggaattgaacatatatttttttgttcctgaaaatgagtcctgcctcagtctctccagggcatggtgaggggtgggagtggtagctggtagaaagctagtgtccttaagacaaggattggctttaatcctgctttgggtctttgggtgatttgaaatccaaatgtggatacaaatgtctactttttttgtttgtttgattttgagacagggtctcactctgtcacccaggctggagtgcagtggcatgatctcggcttactgcagccttgacctcctgggcttgggtgattcttccacctcagcctccccgagtagttgagactacaggtgcctgccaccacgcccagctaatgttttgtatttttagtagagatggggttccactatgtcacccaggctggtcttgaacacctgaactcaaggaatccacccgcctcagcctcccagagtgctgggattactggcatgagacactgcacctggccacaaaagtctatttaagagtacaaatgagggaaaaataatctagttttgccaattatattatcactaaagctcttatgttgttgtaaaaagtcaccagacatattgtataatgtcacatccgtctttctttctttctctctctccttccttctttttttttttttttctttctttcctccctccctccttccctgcttccttccttccttccttctctctctctctctctctctctctttctctttagagacagggtcttactctgtcacccaggctggagtgcagtggtgtgatcatagctcactaaagccttgaactcctgggcttaagcctcctcccacttcagcttcccaaataatgttgaatttagatgataagtttacacaggtctttaaattcaaccaactctcatcctatggattcagagacaacagctgactatccaggagataaagattcctggctgttccttctcacaatcttctttgcttattggaaaatgctggagttaccccaaattctgtcctgtttctttttctttctctcattttaatccttcttgagctttttcaaatgtgtcatgtttaaaagtggactcatcctttcttttcttttttttttgttcttctttctttttttttgagatgaagtttcgctcttgttgcccaggctggagtgcaatggcgcgatcttggctcaccacaacctccctgtcctgggttcaagatattctcctgcctcagcctcccaagtagctgggattacaggctaccagctaattttgtatttttagtagagatggggtttctccatgttggtcaggctggtctccaactcctgacctcaagtgatccgcctgcctcagcctcccaaagcgctgggattacaggcatgagccaccatgcccggcccatcctttcctttctaacccagttcctggttgtccccctgctgagtagacagcaccagccatggcctcagccaggcaccccactctccctcacagttcacattttcagtgagtgctaggctttctacttccttctctctaattcactcttcattttctccaaactcctgctatcccccaggaacagggaagcatcctctcttgctagattatagcaggagcctccctatctcctgagatcatccaggctgatcttgctaaatgttcaactctgttcctgtcttgcccctctttaaaccatatacttccatagaattaagcccaggttcttttgtcaattgttttcctttttattaattaattaattttttttttgagattgaatcttgctctgttgcgcaggctggagtgcaatggcgtgatctcggctatccacaacctctgcctcctgggttcaagtgattctcctgcctcagcctcctgagtagctgggaccatgggcacacaccaccatgcctggctaatttttgtatttttagtaaagacggggtttcagtgttggccaggctggtcttgaactcctgacctcgtgatctccccacctcagcctcccaaagtgctgggattacaggtgtgagccactgcacccagccttattattttttagagatggtgtcttgctgtgtctcccaggctggagcgcagtggtgcgatcatagcttacctcagcctcgaactcttgggctcatgcattcctcctgcttcagcctcctgagtagctgggaatacaggtgtgcaccaccacatctggtcaatttttaaattttttgtagagatggagtctcactatgttgtccattctggttttgaacttctggcctggaaccttccatcgatcctcccatctctgcaagcctagacatttaacatggtctagaaggcctccatgagctccatctcacctcttttttgctccttccgctccggacctttacaagttgtggccattccaaactcctttcacttctgattatctcatgttctctctcacctccccgcccatgcaatgaggttcctccccaactagattcttattcctcttagattctcagagaagccttccctgaaagaagccgtctcccatctcccagattgggttaggctcctcctgtgtgctgacttcattgtctctctccaacattgcttagaacgctaagttgcaactttatgtctaattgattgctccactagtccataaaatctaggaggaaagggctgtatccttagcccttgacacatggccttgtacatcttaagtttgcatatgaaccgctttatttacctgggatattatcttacttaatccccaagacaaccctatacgttgtgcatgattattccaatggtcattactgttattttaaatagagatgggggctcactatgttgcccaggctggtcttaaactcctgggctcaggtgttcctcccaccttggcctcctaaagtgttaggattacaggcatcagccaccatgcctagtcgattatgccccttttaatggatgagcaaagagtcgaggttccactggttttccactgcagtgtctctgctgaaggattaaaaaaaaaaaaatcacagggctgtgctggactcctgggacttccagaggacaagtccctctcttcagtgaggctgacctacacagagccagccctccttcccctcccagccacagctgtgtgttggaaagctagaggcctgggcccctaataaagagcagacctcccaatctcctcgttccttccccctcccctcatatggtttttcaaattaaaagcaactaaaaccaaagacctaaggagcaggagagggcagaggcacaacaacatccctaaactgaggaagggggctctctagcgagggagggggtatccaaaagccagatccagagggttccagtcctaccagtctgtcccaggctctaaggagtgtatggcccaccgggctgggctggaccaggaaacaagctcttgtcctcaggtctgtaaacaggctgcgttgttaggaaccctctgcttctacttcctgaagagcaagccccccaaacccagaagagaggctgcaccttgagatccagccagcaaggtgggtgcggagtcctggggagggaactttcacctcaagctgcacagacccatctcgatctttttagagaattcctccttttccaggactagtgccgttctgaattctgagcgtgcaaagagactccttagagctagcttccgagcctcagctggggcagaccagaggccagggcgtctctctgtctgcggggaccccccacatctgtgcgtcacctccaccacctccgggcaaaggacccttcctcgctggacccagggaggcggctattccagatgcagccaagggttaaagggggtgggagaaggagcagttagcaccgttttcttttgcaaaccaccaaacgggcccttcattttcaaattgtgaagccagaaacatcccccgttcccttgccccgcccatcaccatttgaaaaaaagaattcacaagtttaaacgtgattttcacaactaacggctttgataactgttaaattcgtacggcttctagggcaaacggacctgaattcttcaaggaaagtagaattggcggtggagctggggggcagaggaggagaagacacaaaaagccaactcagtgggaagcgccctcaaagccaaaggtgtggcgctcggagctgtggccgccctcgcccgggagtcggggccaggagaacgggccctggaggcagggcagggcacggcgagattttgcttttgtttttagtgaccattttgatctggttgtaaaaagtttacgaggccttctttttgaaagtcagctaatcgactgcacctttttatacccttgccctcaatttcatgtcgcctgctggcctagacgcgcaaggcggaggacagaactgtcacagtccctacccttttctcccaacttctcggcccggctcaattcgggagttgggcctccttcctctcggctcgcagcctccccgactcccactttggggagaaaacccacattcttaaccccttgataatccctcaaggaaaaaacaaaacaaaaaaccccaagaggttgaaaattagaatccgggcgcgggttgagatctgcgcagagctgcccaggccagtgcatgtcgctcctctcctccgggtacatatggtggcctggtcccctccccccaccccccacacggtgcccagtgagaagcacaagaaggggagaaaagacccgcagcccgcctcaggagggcaaggtttctagccccctgcggctccgggaccacccaggacccggggcgtcgtgggaccgatctcgaaggatcttagaacgacactgggagagcgcggcaagaactagccccaccttcccccgacgccccggactgactgccgggcgcagacccgacttctcccgaaccagcctcggaccagccttagaaggcggaaaacaggattcaaacccgcctatgagcagtggtaggggcgggggctgtgggggcaggactcggtttaaggaaccaaccgcctcggttcgagggcctcctgtccggaggttgctcctgaccactgggtttattttgcttttgcagaggaggcagatgttgacctctcttctttgcacagtctctccgcaaaattttcccccaaccatttgctttcttgcgccaccccccaccggggcactatccctggagtcagctcctcaggcctttaaaccttccagaatgtcacacatggaaacctttagcaaatgtttgttaatgatcataacaaaggcatcattcaaattaggcaggtaattactaccagaaggacaactgggtgctcgcttgctcatccattgctttctgctttaaactcccgaggagtcgctgcctggagacactcccgcccggactgcttctcgggccccattaaacggctctgaaatgaactgtgaagttaccatttgtgggcggagagcgctggggccctgcggacggaagaccctggcttgaccggactaacagtgtcgccgaagcaaagcagcccctctgggtaggctgtctgtctcgcctcctaccctctggggcaactagcctaaaaacccggttctcaacttaacagcatgtggcccagcacccgcttttgccttttattccgcactctgatttttggggggatcgtttgttcccgctcattttctacaaacattacggtatcctgttagcattccgaacaaggggctgttcatatatttgccttcaatgatttcctgaagggacatgtggaagtaatagcgagcggtgcagtcacccaagctgaagatgcacgagagcgggtcgcgtagaagaactgcggcaatgggacccccagcgcagccccaggcgccctgttttcgaggctgacatcccaagatcctgtcctggttaggcacagcaccgcgcccgttggagtacttctctgtgactctcccctgtccactgcactgtgtccaccctcctggtgaaggaggagacggctgttggacatgccagtcccaacctggccactttggccattttcagagtgcgtgtgttggggtggggttgagggagaaggatgaaggatgacccccaaccccaacaggagaattcaaaaatcagagagcgatgaaggtgaacgcgctcccctcccccgctgtcgctgggaagccccactctgcccaggtctggttcctggagcatcagcgccccctttccctcgccggcaggatcgtttcctcccgacactggcctctcgccttgggcgcagggtttggggctcagctgtcaattccaaggaattcgtagggttcgacccacgcggcgggagggaacggagggagaatcaaaaggcatcctcccccacgacgcggaggcggtggtacgattcctcaaacgcccaagcttgagctttttttgtatgcgagatagaagccagggcaacctcgcccagataaccccgaaaacaaaggcacgaccagataagtgacttcaagggagtaaaggtcgttctatcggagaacgttccaaacctacacagaccctcttttctttgtaccgtatttcagaccacccagtcttgtacacacacacacaccacacaaaacaaaaacccatcattgtcatattggactcaacagtttgcccaatcctattaaataactagcaactatatagcccttcccctaaaagacccctagttcaaaacggcgcaaccgcttggagatttctcccgagggccctatttctcgttgggccgagtttgtagaagggacatttcttgattctagatttatattctctctgggtattaaatgcaattttgtatgttccttttcttcttttcaaagagaatacaaaactatagcagtctaagaaaataaccccaaaatggggaggcaaactcattctggaaatgatgggctgtttgtagtttcacaaaacctctttcccggcagagcaccaacacctcccccttccaccaccccccatcccatctggtctgcttctccccgccccccagttgttgtcgaagtctgggggttgggactggaccccctgattgcgtaagagcaaaaagcgaaggcgcaatctggacactgggagattcggagcgcagggagtttgagagaaacttttattttgaagagaccaaggttgagggggggcttatttcctgacagctatttacttagagcaaatgattagttttagaaggatggactataacattgaatcaattacaaaacgcggtttttgagcccattactgttggagctacagggagagaaacagaggaggagactgcaagagatcattggaggccgtgggcacgctctttactccatgtgtgggacattcattgcggaataacatcggaggagaaggtaagggaaaagaaaaaatgattttttgtttataagggaagtccctgatcagactctgggactggagaaagcgaagtaacttcaaactttgggcgacaagaaaaaaaaaaaggagctggattccagttgtgtgtccagagagtaatttttttttttcggaataaacttcacttggggacgggtgggagataaccatagagttagaaagtctaggtattttttttaaacacacattttccagacctatttttaaaaacaatgtttttctaacaaccctatggcctcccaaagaaattgtttaggcttacatttttgaggtttcttttgggagtgggggtggtgttcgtgaatactgggccgaacaccaaggaactgggggtggaggcagaggtgtttgccctcttcttggcagtgggtcctggaaggcgacaggttttaaatgagtgttttcattcctcgcctgcggtttggcgggacagcgctgcagcccatggtgtggagcgcggctgggggaccagggggaggtggggagaggggagcgtggaggggagcgtggaggggggcgcgcgaaggggttgcggggcgcaggaggcgggctgggctcggctggagaccggacctcggtgttggcctacagcacagggagccggccgaatgcgcgtgattactggacggcgctgctctgggagagagtcggggccagatttggcgcggcggtgaggcggctgcgggacaagcagaggcgcgcgggcgtgggcaagggtttggggcgctctggagcggtttgttgggtcagtgaggtgccagggagagcgggtgcctgccgggcagtgtgctcgggttgcacgccctagcgcgggggcgacagcggcggcgcgggcgggcggtctggaataatgacaaacacatttggccctgagtgaagaagtcgtcgtcgcctcgcattccagcaactgggatttgaggaatttcgaaccgcacaccaaggggccctcattgtgctccgtggcccccgcccccgcctgtcttcccgcgccccctcctcggtggaatcatttctgcattgcccgggggctctgctttcgctcagttctggccgcaggcaggaagagaggaaaggtctccaggaaggtgccgaacttcttgtgaggaagttagggacgacttggaactggggaaacttgtttgcaggtaagacagaaaggtgggaggtaaaccatattctccctccgggcacccgagccctggacaccccctacccggcacccttctccgcgcgggggtgcgtggcacttgccgtctgagctcgcccagcgctgctcggtcctctctagttggccttttttccattcctctccctgccggcttcagagccgtctgtgcgtacttctccttcctctgctgtctacccccatggaaaccagatttacacacgaaattaactccgcccggctgcgcccagggagcgggcggcgtccatttggcattgaatatgtgggatcagctgttctattccgggagggtgtcggccaggtcggagcgacgagtgtggcccaacccgagtacgttgccagagggagccaggagcctgggccgggccaggtgtgcgagagctgccgatggcctggcctcgcgtcttggtcgggaaggacttgctggcctggcaggctgtgcgttgtgcatccctcccgcagccagagcgccggtcccgcacttcgctccccgaattgtgctaagacctcaggatgtgcgcaaggagtgcctggaagaacttgccactcactccatcttcctgggtgggaggcaagcatggatggggcccatatcaggtccctaccgccccgcgtccgaaaagccgcgggctgggcggtgtgggaaatggctttttggctccgaggccaaattgctcaatgttttggaccgactcgcctcgccgcggtcgctcctgacaagaactagacagatttttggagcagggagcatccagggcaaacgcacgacagtcctccgcagtgcatctcaccggacaaacatccccggagccacaggaggggaggaaggggctctccgggcgtgcgcacctccccagccgccgcgctgtcccatccccgacccctaatctggtcaacctggaccccggcactgctgaattgcatcccctcttctccctttctcctcggcctcctcctttccacaaccctcaagatgaggaggccctgcctcgactccccgacaggcgcaaggccgaccaggctcgctttgacgccctggtcaggccctgcttcggagcttgcagttttgggttgacccaagtgcagctggacctcgttcacaagagtgaggggaagccaagaatgaacccgtcgttagcccccggtgccctggctcttgtttaaatccttagatcgagaaggacttgaaggagatcccaggctcccagctctgcgcccctgggccagtttcctctcgggacgcggactgaggagggatgcagggggaggggcattgggccgggctttccagctgcaaacacgtctggcgccgaggcgggcccattttgtgcctcctggggacggaccgtgggcggcgcgcagcggcgggacgcgttttggggacgtggtggccagcgccttcctgcagaccccacagggaagtactccctttgacctccggggagctgcgaccaggttatacgttgctggtggaaaagtgacaattctaggaaaagagctaaaagccggatcggtgaccgaaaggtgtgggtctcagggttccccgggtctaactcgccgggtccaaccgcagcatcagccttggggcggcagataatctttcggtctcgcctggggcgcaagatgcaggatcgggggcaaatggcttctcccaacttccccctaattcgggttctgccagatggttgtcgtttgctgaagtggctcggcggcatttccttttgttttaaactgatcaatgagcgaacctgggatgggctgaaaaagtagattgtaggagggaataatgggaaacccgacttggggcgcctccttccctgcctcctactgcagtttctcggcccccgcgaaaggggagcgacaagcgcgggtgggcgcggactcttgagggggcagaggcggctatggcgcgtgtcgggcaaggtggcaccagaaggcacttttgtgtgtgtgtgtgacaagagtctcgctctgtcgcccaggctgaagtgcagtggtgcgatctcggctcactgcaacctctgcctcccaggttcaagcgattctcctgcctcagcctcccgagtaactgggattacaggtgcccgccaccacgccaggctaatttttgtatttttagtagagacggggtttcaccatattggccatgctggtctcgaactcctgacctcaggtgatccgcccacctcggcctcccaaagtgctgggatttacaggcgtaagccaccgcgcccggccaggaacggttcttaaatgccgagagggcgcatgctagctctcctcagcattcccggtgagccgctacccacggccgtgcggctctcgtgcccataggaggcgctggcgagctcctgtaaccctaaacccctcggcccctttccccccacccgcccggattctcttcccgctctcccccctctctccacacccgcccggccccctctcgggtctcagttgaaaacaatgcaaacgcagagcgtcgtgcctggggcgcagcggcctctgcagctctgaggttcagagcgcggcgcgcaggggcgcaggggcgcaggtccccggagcggctgggcatcgccgccaaccccgggacaaccaagccgccgaggacttggtggaggtgggagggagagcggaccgcgcagtgttcctctgggtcccggggtcagaagccggacagtggcgggggctggacagtccgagcgcagagcctcccgggcgaagtctgcgcgcagcactcccggctgcgctgtcggggaccaggagcctgggctgcgggcgagctagctggcgagccgggtaagattcgcggggctgtcgcgccctctagtgggctccggggacgcatcccgctttccccagccccgggcggtcggcgccgctatctcagtggagcgcagcgctggaaccccgggggcccggagcggaggctaatctgggtcacctttcccctcctccgggcagccagtggactcctcgcaggctctgtgtgggcccgggaggcgccgggtggacgagagggggccgaggtctctgggtttggattgagaatgggacgtccttgtaattcaatgtgggagaagcaggggagtgtggaggaggacgggtcccgtgcgttcttggggggcaggcgccgtcttctgcgttccagcccctcgccagctcccttgccccgcgggcggcctgttgctgtttgtttgttttacgaccctgcgttattgtgcaacggtaacagtcgtttccaatcagctgcgcggccgtcgcggccctcgccaggctggtttatgggggcggcggtggcgcgcggacagataggacagcgcggcccgggaacggcgtcgaggtccaggcggtccccctgccccgagggggcggaaatgctgaggtggcgagagcgtgggttgcacagaaccctagtagcgagtccggctgagcctctgcggcctagcccagcagcgtcgtcttcccggctccgaagacgtcttcccgaagccccgctgccccggcgcaccagctcccggtgatggggatgatgatggggatgatggggagatgtccccgaattctcctggggtcccgaggagatttagccattttcaacagcagttttcctatttctgcttaaaccccgcgggctttcaactgaggtcaccacgaaagctaaaagtacaacctaaggaaggaagagactggaaattaacatttggggtagtggagctcagaattcctcgcagcggcgtctgtgtcgcaacccgtggacgcacgtccttggaccaacactgccatctgctggccactcgtaagaactactgcgacccgctgtgagaatgggcttcgcggagaccattaggaaggtgctttattttttattttttatttattttttgctcagtaggaccgtaataggtgactgattttcttttgctgtgaggctacaagaattgctggaagacaacatttttatttcgtggaaatttgtgttgtgtttctccttggttgttaatgctttgcatttacatagtgaacatcttattatcagagctggcctgtgaggagggtagtgggggggcattgatgttcccgtttctgagtgaggagacctatgtcggggccttggtgacctcaagccgaatgctcaaactgctactgctactcctaaggttgtgccattaggagtcacacccgtttggtgatattcaaaaggatatgtcattttattctcccgtggttaaatatatggtgagaggagagcaggcatgtttatgagcccagattgtcccataaaaggctcctgtttaaaaacactccagccccctcccattactggaatgtctgatggagctccgggagatcaaaacaacaaaacaggctctggtagggtgcagaggtcctggtaaacacaccctctgctggaaaacagggagaagtttccaccagtgtagacctgcacttggtttgcctgggctgaagttaggagactgcgtagaaaaaggaaaatgtgtaattttcacagttagaattaacttaggagagctgaaattaactgagcctcggaaatctgaatcttgaagtcaccagtggcttttggggctgtgagagagtctcctgtggtctttaatcatgtgagggtggggtgaaattcaatattcagtggttctgcaatgggatgcactgtgcaattggtgattgagaagccaactctctggctttaggagaagaatgtcttgctgttagtccttctggaaatagagccttgcattgcctactgtctgtttacactacctttgcacattgcctttggttatagagtcatgtccaatggctctttacttctgtttgcagggcaggagatggcaccctgttaaagagaaaggatagtagctgcaaagtcatttgtttctctgtttctgtgactgtatatattggctcatctttgaatggtctttatagccacaccaggctggaggtaacagggtcatgggagtggactgctggtgtgggctgaatcagagttcagatccatgtctccaggaggtaggaggtgcagggcaagtcatgtggcttctggggcatccctcactttcttagttaaggagaagttgaaggagccgatctaaaatatcttgggagtctgcagaaaaagtcgtgaaaatcaaagcactttcaattaaactatataatttagtccttacaagaatgccacagggcaagcaaccagtcaggccttggtagtcgtgcttcctagaagaaaagactgaggttcagagagttggatagagtatcagatttgggatcagtggctagtccaatgtgatttccatcctttcttctgagagaaagcataagaaggccaagaggatggtggaaaagcacaagtcacctgcctgagagtcaacagggcggggggtctctttctcagtttgttcctctaagttatggcaaatgttttttgagctgtgattattgagaatgggggctgaagttcaacatgtagttggcatgagggaagtaattatgattgaagaaaagatttgggtgaaatctagtgttcttccctgcaaagggggttgttctcacggattcttatggtgccatgtttctcagaatttgtagtttcagttacttatatttgcacacctgactttagatgagctccagaatagcagttactaattaaggatgagcatttagagtagataaaagtggcaggaacagcaagactcactcccagagagcctcactacaggtctaataggtgaggaaattccccatgtttcccatttttcttcattacctccctgtggggcaagcactgccattattcatgagtaaactgtctgagttatagataagtaatgacatgaaacttcacaaacacgctgagcacagtggctcacgcctgtaatcccagcactttgggaagccgacgtgggtgaatcacgaggtcaggagttcgagatcagcctgaccaacatggtgaaaccctgtctgtactaaaaatacaagaaattagctggccatgatggtgggcacctgtaataccagctactcgggaggctgagacaggagaatcgcttgaacttgggaggcagaggttgcaatgagctgagatcatgccactgcactccagcccaggcggcagtgcaagactccatctaaaaaaagaaaaagaaagaaagaaaaaagaaaaaaagaaagttcacaaacaggcctgatttctacccagggaaccactgttatcagagattggggtttggaatcttaagcaacaaacacatgtttattctcttccttcctgatggcttgctcagaggacctgtttccattgcccactttttttttgagacagaatcttgctctgtcacccaggctggagtgcagtggcgagatcctggctcactgcaacctctgcctactgggttgaagccattctcctgcctcagcctcccgagtagctgggattataggtacctgccgccatgcctggctaattttttgtatttttagtagagatggggtttcatcatgtcggccaggatggtcttgaactcctgacctcaagtgatctgcccacctcagccttccaaagtgttgggattacagatgtgagccaccacgcccggcctcattggccactttatatgtcagtaaataatctttcctggcagagggtccactgtatctggaggcactgaaggaaatctgggagtgtctggccagggcaaagcactgcttagagcttgcacaggaaaagcagtgagcccttcttttaagctggagaaagctttaaagatgcatctttggcaagtcttgccaaagaaatatgggttctaaatgtgataaaaccaaagacatcaagctggctctggaggccttgtttgaagtttgctgagtggattgtcagtgggaggctgatatttatatgtacaaacacacaagcattactgctaattgtggtaaatcaggctggccagcctggctctggggcccactgtgcctgccaccgcagcagtgtggaagccttgcatcccaggcacatgtcaggatcctcggaggccatcagccagccagcattgtgtgaattgcatttgggttcacagcactgtaattgtgtttctcctgctgtggtgagcaaaggaggaaaatggaaggaggaggtataatttgccctaggaaatagtcaggcaagtaggtggcacacaggggtgggatatggctaaaacactgaccttcccttgagagagaccatatggtgaagtggagagggcatggcgtttgtatcacacgaccttgtgttcaaatcctggctctgtcactggctgtgtgactttgggtcatttgcaaaacctctctgagcctcaactgccacttcttaaaatcagctctaagtaatcacagggttattcttcacaaacacagcatgcacatgcaaactttggcttagtaaataatggtttctccttctcttactttgttttctacataccccactccccttcctgtgaggagccttccacctttttctctgtgttctcttcctctcccattttcctggtagcattcaataaaacagaaatctgatttctgcaaagtaggccaccttacggtagaaatacatgattaggccccaccaaaaactttgattaggctattatcttctggatcctggatcccctccaaccaaaccaaacccaactagggctaaacacagcaatatatgaatacattgaatttctctctcactctttcttttttttaaaccagtttactcaggaatcacatgcacacatattttagcttccaaagccaatgatggaacaaattgtgtcccattaggctcactccattgtatgagttagcatcagaggagttcataccagagtgacttcatcttgaatagggcctaggtaagaagaggatgagacctgctgggctgcattcccaggaggttacacatttgtagtcacaggagagaaaggagttggtataggagttgatagatacaggtcataaagaccccagtgataaaacaggttgcaggccaggtttggtggctcattcctgtaatcatagtactttgggaggccaaggcaggaagattgcttgagcccaggatttcaagatgagcctggacaacatagtgagaccttgtctctacaaacaataattttaaaaacatgagctgggcatgatggtgcaggcctatagtcccagctactggtctgaggggcagttgggtggcaggctgagatgggaggatggaggctgcggtgagctgagatcaggccactgcactccagcctgggtgatggaataagaccctgtctcaaaaatagataaataaataaataaataagccagcaaaaccagaatgcagtgaagaagctggccaaaacccaccaaaacgaagatggtgatgaaagtgacctctggtcatccctactgcttattacacactaattataatgcattagcatgttaaaagacactcccaccagtgccatggcagtttacaaatgccatagcaatgaccagagatactctatatggtctaaaaaggggaggaaccctcagtcctgggaattacctgtccctttcagggaaaactcatgaatcttctaccgcttgttgagcgtataatcaagaaataactataggtatactcactcaagcagccatgcagttgctgtgcccatggagtagccactcttttattcttttactttcttaatatatttgctgtcattttactcttttggcttgctcttgaattccttcctgcatgaagccaagaacctttgtgacctcccaggctgaaccccaattttgagttccaccctatgacatcttttctggtgaccaatgaagggacaatggtaacctcccgttgactttaaattaaaactgattggcactgtttgggcttcaccggtgggtgagtctctccttgcccagattcaacttgctaacatttttttctcttcaattttggctcctttgtccttcctaatgttcttcattttggacagatgggaaagtggctgtgaggcctctggcttagcagcctgatagcagcctcctgttgtctgggtgccccagatgggagcacgcctggctggccacatcttttgcaacccaccttgtcatcccttctctgggaccttttctctttagtttcttttttaaaaaaaattttaaattatttatttatttatttatttttagagatagcatctcgctgtgttgcccaggctggagtgcagtggcataatcatggctcactgaagcctggacctcactggctcaagtgatccttccacctcagcctcctgagtagctgggactataggcatgcaccaccacgcctggctaaattttgtattttttttgtagagacggggttttgccatgctgcctagactggtcttgaactcctgggctcaaatgatctgcctgcctcagcttcccaaggtactgggattataggtgtgagccactgcacctggcctctctttagtttttaatgactggctgtttgacttctctgctcttcaggctgaaattcttatttcatgtttgtagtctttgccttggctatttggcaactgtttaaggcaagacacttggttttgagagttctcccgttgtgttgaccctgggacaccagggtcattgttctgtagctccaattatgttaggtctcatgcttttgggtttcactattggccaccccccagatgctctggggtttttggcatttggtgtggggacccttgttagctgatactctgggcttttcggcatttggatgctccagggtgtttggcactgacattcccctctagcattgtgggttagagtcccacccaggggaaatcttggttttgccttttcttgttttctactctaaagttatcattttctataaaaacattttcttttcttattgtcactttgtttaatgctttgctccaggaggtgggaatttgcaggggaaaataattgggctctccctatacttagaaaaacttctgtgtctagtagagatccttgttagacaaagggacagtggtgagtcccagagaactcgtcactagggtgccttttaggcaattggagcaaattcaaattagcaaactaagtttggccatttggataagtcccagttttgtcagggaaataatttgggtccagctatcttttataaaatagtgcgtttgcgttcctacattatggctagagctcaaagataaaagctattggatctttgtttatgtgtgtgtataaatgtctagatgtgtttatgtgtatgtacatttattatgttatatattgtatctacagggtaccaaattggcttataaataaaagagtgctcataaaaagagtaaataagtccaagcatttctcaagctcatgtaacttaagtttactaaaatttagagttactaaaaattcatatataactctgtataaatgtgccaaagaagatatgctcttagtgaaaataaattctttttggccaattcagatgtcatttatatgtggggtttaaaatatgaatttcgaaagaaaataaaaacaagtagaaagaaataaaaaacaataagcagtggagagagatgtgaggaaagttatgaatatgaagacgtatttttggtaaggaatgttataaagaaattttatgagaaaggatcttatatgataaattcttgtcctaaggtagaatgactgattgtttagaaaagaaggaaatataggacaagtcagaaagtccaagcatgttgtagatgacctatgtaagtcacgataaagtttatacaagagaatttattaaaatttagatgtaattagccataactgaaaggaaatttatttatttatttatttatttatttatttatttatttatgatttattttgagaaggagttttgctcttgttgcccaggctggagtgcaatgtcatgatcttggttcactgcagcctccgcatcctgggttcaggcatttctcctgtctcagcctcctgagtagctaggattacaggcatgcaccaccacacctggctaattttgtatttttagtagagatggggtttcatcatgtttgtcaggctggtctcaaactcctgacctcagttgatccacccaccttggcctcccaaggtgctgggattacaggcatgagccacctcatgcacccagccaggaaatttatatataatactctatctaaattttggtgccctatgttaaaacaagtttttcttcaagtattggtttgctttcagtaagattgcaagaaatattgacttttaattctagaatctgtttcctttgaaggcctctcagatttatatcttttccttttcccttgaaaaggtatagcctttgcaagttcaaaactgacttccctagactccttttaggaaaagcaatacagtggttgtttcaggctgtggctcaatagctaagcctttgttctttcatggtggtggcctgggttcagttcctggcttagagaatgagaggtttccagtttgctacttctgggacttttgtcatttatttattctttttgtctccatcgacagcttctgattttctcacttgaatttttttttctgtgagctaccttaagggtaatgttggatcttgtaaaaattgcttgccatctctttggagatacctcttgtgtccatggttaagttataaccttggttaaggcctgttggtttcactagggaaaatacctttaaaaaaaggcttaaaagccagagatgttggctatttgtcctggctagagtctggtattaagggatttaaaaggattttttaaaggacctctatagttataagtcagcttaattaaaaatggatattccatagtcatatttatatatatatacacacacatatatatgtatgtatgtgtgtatatatatatatttaaaagacctgtatgatttttttcttcttggaacttatttttttgagagaaagtgttttgtgtgtttgttgtttgtttttcttctcagtggactgaattatttctccattctgtctttttaccccctttaatgaccatattagaggacctaagataatttctgacagcctgggactccttgggaggaaacagaaggtgccacagacctcgttttgggagaaacctctgttttcctcatggaaccccaagagctgtaagcagagagttctccctcagaatccaaggctctgctctgtttacgtcacattacctgacctttgtgacttttgggggcatcagaaattactttgcattatgagggaacctttagcattggtgtgtattacctaggtaggatgtgtacttttagggattgcagttgcttacatgagtggttattactacagaccaatacttctttcttctcacatttaaatgaaaaaaaagcatgctcttgggcatccacctatgaatggaggatgggctgatttgctttaggttggccaccagcctttggggaacatcgttgcagtgaaatgcttggtgaaagcattgcactgtctgatcgcatagtgcacttctatgcacttctgcctgatgtcctaggctcaacacctgctacataattaagatcacttacttatcaggtttttaatcaaaatgaaatgttgctaagagttaacattatagcatatgtaattgagattactggagaaagttttacctacaagatatgtaaggaaagcaaaatgtgtttttggtaaaagattataggaaggtgtgccagtatagttttttattttgcttactttaatgggttaaaggattgttttaagtttgataggagaaagctgaagcatgagcaagttgtggaaggtatatgaaagattaacattttaaaagaaattctgtgtgtaaacattggctaaagttaaaggaggaggttggagccaagatggctgaataggaacagctccggtctacagctcccagcatcagcgatgcagaagatgggtgatttctgcatttccatctgaggtatcaggttcctatcactagggagtgccagacagtgggcgcaggacagtgggtgcagcgcaccgtgcgcgaaccgaagcagggcaagccattgcctcactcggaaagtgcaaggagtcagggagttccctttcctagtcaaagaaaggggtgacagacggcacctggaaaatcgggtcactcccaccccaatactgcgcttttccgacgggcttaaaaaaaggcacaccaggagattatatcccgcacatggctcagagggtcctacgcccacagagtctcgctgattgctagcacagcagcctgagatcaaactgcaaggcagcagcgaggctgggggaggggtgcccaccattgcccaggcttgcttaggtaaacaaagcggctgggaagctcgaacagggtggagcccaccacagctcaaggaggcctgcctgcctctgtaggctccatctctgggggtagggcacagacaaacaaaaagacagcagtaacctctgcagacttaaatgtccctgtctgacagctttgaagagagcagtgattctcccagcacacagctggagatctgagaacgggcagactgcctcctcaagtgggtccctgacccctgacccctgagcagcctaactgggaggcaccccctagtaggggcagactgacacctcacacagccgggtactcctctgagacaaaacttccagaggaatgatcagacagcagcatttgcggttcacgaaaatctgctgttctgccgccactgctgctggtacccaggcaaacagggtctggagtggacctttagcaaactccaacagacctgcagctgaggatcctgtctgttagaaggaaaactaacaaacagaaaggacatccacaccaaaaacccatctgtacatcaccatcatcaaagaccgaaagtagataaaaccacaaagatggggaaaaaacagagcagaaaaactggaaactctgaaaagcagagcgcctctcctcctccagaggaacgcagctcctcaccagcaatggaacaaagctggacggagaatgactttgacgagttgagagaagaaggcttcagacgatcaaactactccgagctacaggaggaaattcaaaccaaaggcaaagaagttgaaaactttgaaaaaactttagacgaatctataactagaataaccaatacagagaagtgcttaaaggagcagatggagctgaaagccaaggctcaagaactacatgaagaatgcagaagccttaggagctgatgcgatcaactggaagaaagggtatcagtgatggaagatgaaatgaatgaaatgaaatgagaagggaagtttaaagaaaaaagaataaaaagaaacgaacaaagcctccaagaaatatgggactatgtgaaaagaccaaatctacgtctgattggtgtacctgaaagtgacggggagaatggaaccaagttggaaaacactctgcaggatattatccaggagaacctccccaatctagcaaggcaggccaacattcagattcaggaaatacagagaacgccacaaagatactcctcgagaagagcaactccaagacacataattgtcagattcaccaaagttgaaggaaaaaatgttaagggcagccagagagtaaggtcaggttacccacaaagggaagcccatcagactaacagtggatctctcagcagaaactctacaagccagaagagagtgggggccaatattcaacattcttaaagaaaagaattttcaacccagaatttcatatccagccaaactaagcttcataagtgaaggagaaataaaatactttacagacaagcaaatgctgagagattctgtcaccaccaggcctgccctaaaagagctcctgaaggaagcactaaacatggaaaggaacaaccggtaccagccactgcaaaatcatgccaaattgtaaagaccattgaggctaggaagaaactgcatcaactaacgagcaaaataaccagctaacatcataatgacaggatcaaattcacacataacaatattaactttaaatgtaaatggactaaatgcttcaatcaaaagacacagactggcaaattggataaagagtcaagacccatcagtgtgctgtattcaggaaacccatctcacgtgcagagacacacataggctcaaaataaaaggatggaggaagatctaccaagcaaatggaaaacaaaaaaaggcaggggttgcaatcctagtctctgataaaacagactttaaaccaacaaagatcaaaagagacaaagaaggccattacataatggtaaagggatcaattcaacaggaagagctaactatcctaaatatatatgcacccaacaatacaggagcacccagattcataaagcaagtcctgagtgacctacaaagagacttagactcccacacaataataattggagactttaacaccccactgtcaatattagacagatcaacgagacaaaaagttaacaaagatagccaggaattgaactcagctctgcaccaagcggacctaatagacatctacagaactctccaccccaaatcaacagaatatacatgtttttcagcaccacaccacacctatcccaaaattgaccacatagttggaagtaaagcactcctcagcaaatgtaaaagaacagaaattataacaaactgtctctcagaccacagtgcaatcaaaccagaactcaggattaagaaactcactgaaaactgctcaactacatggaaactgaacaacctgctcctgaatgactactgggtacataacgaaatgaaggcagaaataaagatgttctttgaaccgacgagaacaaagacacaacataccagaatctctgggacacattcaaagcagtgtgtagagggaaatttatagcactaaatgcccacaagagaaagcaggaaagatccaaaattgtcaccctaacatcacaattaaaagaactagaaaagcaagagcaaacacattcaaaagctagcagaaggcaagaaataactaaaatcagagcagaactgaaggaaatagagacacaaaaaacccttcaaaaaattaatgaatccaggagctggttttttgaaaggatcaacaaaattgatagactgctagcaagactaataaagaagaaaagagagaagaatcaaatagacgcaaaaaaaaaaatgataaaggggatatcaccaccgatcccacagaaatgcaaactaccatcagagaataccacaaacacctctatgcaaataaactagaaaatctagaagaagtggataaattcctcgacacatacaccctcccaagactaaaccaggaagaagttgattctctgaatagaccaataacaggctctgaaattgtggcaataatcagtagcttaccaaccaaaaagagtccaggaccagatggattcacagccgaattctaccagaggtacaaggaggaactggtaccattccttctgaaactattccaatcaatagaaaaagagggaatcctccctaactcattttatgagggcagcatcatcctgataccaaagccaggcagagacacaaccaaaaaagagaattttagaccaatatccttggtgaacattgatgcaaaaatcctcaataaaatactggcaaacagaatccagcagcacatcaaaaagcttatccaccatgatcaagttggcttcatgcctgggatgcaaggctggttcaatatacccaaatcaataaatgtaatccagcatgtaaacagaaccaaagacaaaaaccacatgattatctcaatagatgcagaaaaggcctttgacaaaattcaacaacccttcatgctaaaaactctcaataaattaggtatgtaaatgggacgtatctcaaaataataagagctatctatgacaaacccacagccaatatcatactgaatgggcaaaaactggaagcattccctttgaaaactggcacaagacagggatgcgctctctcaccactcctattcaacatagtgttggacgttctggccagggcaattaggcaggagaaggaaataaagagtattcagttaggaaaagaggaagtcaaattgtccctgtttgcggatgacatgattgtatatctagaaaaccccattgtctcagcccaaaatctcctgaagctgataagcaacttcagcaaagtctcaggatacaaaatcaatgtacaaaaatcacaagcattcttatacaccaataacagacaaacagccaaatcgtgagtgaactcccattcacaattgcttcaaagagaataaaatacctaggaatccaacttacaagggacgtgaaggacctcttcaagaactacaaaccactgctcaatgaaataaaagaggatacaaacaaatggaagaccattccatgctcatgtgtaggaagaatcaatatcatgaaaatggccatactgcctaaagtaatttatagattcaatgccatccccatcaagctaccaatgactttcttcacagaattggaaaaaactactttaaagttcatgtggaaccaaaaaagagcccgcatcgccaagtcagtcctaagccaaaagaacaaagctggaggcatcacgctacctgacttcaaactatactacaaagctacagtaaccaaaacagcatggtactggtaccaaaacagagatatagatcaatggaacagaacagaaccctcagaaataacgccgcatatctacaactatctgatctttgacaaacctgagaaaaacaagcaatggggaaaggattctttatttaataaatggtgctgggaaaactggctagccatatgtagaaagctgaaactggatcccttccttacaccttatacaaaaattaattcaagatggattaaagacttaaacgttagacctaaaaccataaaaaccctagaagaaaacctaggcattaccattcaggacatagggcatgggcaaggacttcatgtctaaaacaccaaaagcaatggcaacaaaagccaaaattgacaaatgggatctaattaaactaaagagcttctgcacagtgaaagaaactaccatcagagtgaataggcaacctacaaaatgggagaaaatttttgcaacctactcatctgacaaagggctaatatccagactctacaatgaactttaacaaatttacaggaaaaaaacaaacaaccccatcaaaaagtgggcaaaggacatgaacagacacttctcaaaagaagacatttaagcagccaaaaaaacacatgaaaaaatgctcaccatcactggccatcagagaaatgcaaatcaaaaccacaatgagatagcatctcacaccagttagaatggcaatcattaaaaagtcaggaaacaacaggtgctggagaggatgtggagaaataggaacacttttacactgttggtgtaaaagtgttggtgggactgtaaactagttcaacccttgtgggactgtaaactatttggttggtgggactgtaaactagttcaacccttgtggaagtcagtgtggtgattcctcagggatctagaactagaaataccatttgacccagcaatcccattactgggtatatacccgaaggattataaatcatgctgctataaagacacatgcacacgtatgtttattgcggcactattcacaatagcaaagacttggaaccaacccaaatatccaacgatgatagactggattaagaaaatgtggcacatatacaccatggaatagtatgcagccataaaaaatgatgagttcaggtcctttgtagggacatggatgaaattggaaatcatcattctcagtaaactatcgcaagaagaaaaaaccaaatgccgcatattctcactcataggtgggaattgaacaatgagaacaacacggacacaggaaggggaacatcacactctggggactgttgtggggtgggggtagtggggagggatacctttaggagatatacctcgtgctaaatgacgagttaatgggtgcagcacaccagcatggcacatgtatacatatgtaactaacctgcacattgtgcgcatgtaccctaaaacttaaagtataataataataaaataaaaaaatttttaaaaaataaagttaaagggatattattattattatttttgtaagttaaacattaggattaaaaagcacaacagagttttctagagcactgatctactctgtaacagaaaattgtaaagggtttaaaaggtttatgagaatcttaccttatggtcaaactggttaagattgggaagatttgtctataaagttttattaagaattgggtttgacattaatactacactaatgcaaacgtgaaatgtggctttctctcttgaataagattttcatgtattattacaagataatgaaagatttttatttgctttttaaataaactataggaaaaataagggagagaaaagtgacagatcatttggaaacccaagtctcccctatatcaatgagtaaaagtttttacctttttgaaatctttgagttatcattttggctaaataaatgctttatggtgacctgggattctattttgtaatatcaactgtttaaaccttttgtatttgacaaacgttccaaactgaaattctaatgtaagtctttttctgacctgattagtccttctagatattaggtcccctaaagtccaaaagtgacatatttggcttattagatatattaaaatcatacaggaagcactttcaaatataaaatgctatttggctttctttggactatacttatataaatgtgttattggtatatgttccaaaattatgcaaaactcctataattctgatatgacttagtgtacattatcagtcataattatagttcttatgttacattattgtgtgctacagagttaaccaaatttctttgtcaattgcatctttaatcagctgtcctaagacttttgtcacccacagacaattgtcttgttttaatccttttcaaaaggtggtttataatcagctataggactctgatgggtactctaaaatgcaagcctctgataactttgaaaattgtgccattggctgggcatgatggctcacaactgtaatcccagcactttgggaggctgaggcaggcagatcacgtggggtcaggagttcaagactagcttggccagcatggtgaaatgccatctctactaaaaatacaaaaatcagtcaggcatggtggcatgcacctgtaatcccagttactcgggaggctgaggcaggagaatcacttgaacctgggaggcagaggttgcagtgagctgagatcgcaccattgcattccagcctgggcaacaagagggaaactccgtctcaaaaaaaaaaaaaaaaaaaaattgaaaaagaatattgtgccattgaaacagaaaagaaaacacaaataaacttccaggattctcatagaaacttaatatattcataaggaatgtggcccaatatcaggcaaaacaagagttaacagcatggactaaactaataaaagaccaaaacaatcttttaatgactttttgcttaaaacattgcatatcctttctgttttgcttttcagagtcaagaaaacttttcctttggaaagtatttactgcttttaacaattgaaaaaagtatactactatggacaaaatttggagcatatgtctttctttttacctgatttctccagaatttgaaaactatttgggagtattcttaactaatagcaatatagttatttgcctaagtgcagtaagaatcttttcttttgtaataggacacaattaaagaaactgcttattttatgaaggctttgactagaatggtgtgctttcagatacaaacagactgctttaagggatcaaagttgacttatagagccaataaaagccactatggaaaactggccttattctttgtctatgcagtctctgtatggggttcctgacctgtggtaagtgaagaatgtcactttctgacaggcccaggagccccaagttatcttgggacatcaagaagaaaggaatgcacccaacttatacaggtatttgcaggcacagataaatctgtggctggctcaaggctttaagaagcctaatgtgagattctttttaaattaaatttccatcgaaaccaattttaacaagagcctatgtggcaaataattatttttgctgcactttatacaaataatcaggccaaatttcataagattaaaactttatggcaaacaaatttgtcccactatgatttgtctttggtaaaaatggaagctagagagagaatttgtttcaaaaactatgatacaccagttattagattctagtctcgtctgttgtttttgagtttcttctgcaatttaggcagaccctgcttattcctgagaatcaaccagtgatctatggctgttgctcagaagaaataagagggatggctaacgtaaagatctggattagtattctaattctaggcatgtattagaattggctagtgaccccatatcagcttggttttaacaattacccagttcatggaaagccttcttatttagtttacttgggataattgtgctgattttgttttactgttgtggaatatattgctgttgtcctctttgtgtaggaatgcaggaaaagcttacttaacattttcttaaattgaacacttattaatcttccagatttcaccttttgtcagaactcagagttatgatttgtcctcactgtactgacaacaggctctggtagggtgcagaggtcctggtaaacacaccctctgctggaaaacagggagaagtttccatcagtgtaagcctgcacttgggttgtctgggctgaagttaggagactgagtagaacatttgctgcagaaaaaaaagaagatgtgtaattttcacagttagaattaacttaggagagctgaaattaactgagcctcggaaatctgaatcttgaagtcaccagtggcttttgggactgtgagagagtctcttgtggtctttaatcatgtgagggtggggtgaaattcaatattcagtggttctgcaatgggatgcactgtgcaattggtgattgagaagccaactctctggctttaggagaagaatgtcttgctgttagtccttctggaaatagagccttgcattgcctactgtccgtttacactacctttgcacattgcctttggttatagagtcatgtccaatggctctttacttctgtttgcagggcaggagatggcaccctgttaaagagaaaggatagtagctgcaaagtcatttgtttctctgtttctgtgactgtatatattggctcatctttgaatggtctttatagccacaccaggctggaggtaacagggtcatgggagtggactgctggtgtgggctaaatcagagttcagatccatgtctccaagaggtaggaagtgcagggcaagttatgtggcttctggggcatccctcactttcttagttaaagagaagttgaagtaatcattctgaaatattatgggagtctgcagaaaaagtaatgaaaaccaaagcactttccattaatctccataatttagtccttacgataatgtcacagggcaagcaaccaatcagaccttactagtcgtgcttcctagaagagactgaggttcagagatttggacagagtgtcagatatgggatcagtggctagtccaatgtgatttccatcctttcttctgagagaaagcataagaaggctaagaggatgggggtaaagcacaagtcacctgcctgagagtcaacagagcaggggtctctttctcagtttgtttctctaagttatggcaaaagctttttgagctgtgattattgagaatgggggctgaagttcaacacatagttggcatgagagaagtaattatgattgaagaaatctagatgaaatccattgttcttttctgtaaaggggttgttatccctgattctttttttcttttttcttttttagatggagccttgctctgttgcccaggctggagtgcagtggtgtgatcttggctcactgcaacctctgcctcctgggttcaagtgattctcatgcctcagcctttccagtagctggaactacaggagtgtgccaccatgcccggctaatgtttttatttttagtagaggtggagtttcaccatgttggccaggctggtcttgaactcctgacctcaagtgattcacccaccttggcctcccaaagtgctggaattacaggagtgagccattgtgcctggcctgttctcactgattcttatagtgccatgtttctcagaatttgtggcttcaattacttatatttgtgcacctgacttttaggtgagctccagaatagcattactaattaagaatgagcatttagagtagaaaaagtgacaggaacagcaagactcacttccagaaagcctcactacaggtctaataggtgaggaaagtccccatctttcccatttttcttcattacctccctgtggggcaagcactgccattatgcatgagtaaactgtctgagttatagataagtaatgacatgaaacttcacaaacaggcctagatttctacccagggaaccgctgttatcagagaagggagtttggaatcttaagcaacaaacacatgttgattctcagtatttgcctcctgatggcttgctcagagagcctgttttcattgcccactttatatgtcagtaaataatcttccctggcagtgggtccaccatgtctggatgcacacagggaaatctggtggggtctggccagtgaaaaacactcctcaggttttgcaggaaaagcagtgaacccttcttttaagctcgagaatgctttaaagatgcatcattggcaagccttgccaaagaaatacgggatctaaatgtgataaaagccacgacgacatcaagctggctctggaggtctcctttgaagtttgctgagtggattgtcagtgggaggctgatatttacatgtagaagcacacaagtgttactgctaattgtggtaaatcaggctggccagcctggctctggatcccactgtgcctaacaccagccctgcatcccaggcacatgccgggctcctcagaagcgatcagccagccagcattgtgtgaattgcatttgggttcacagcactgtaattgtccttctcctgctatgaggagcagagagggaaaagggaagggagggttgtgtaatttgccctaggaaattgtgggggagggacaggcactgggccgggtggggggcggtgcgacatggctaaaacactgaccttcccttgagagagaccatatggtgaagtggagagggcacagcttttgcatcacacaggccttgtattagaattttggctctgacaccagctgtgtgaccttgggtcatttgcgaaacctctctgagcctcaactgccccttcttaaaatcagctctaagtaaccacagggttattcttcagaaacacagcatgcacatgcaaactttggcttagtaaataatgatttctttttgttctatctactccacctccctttcccattagaagcttgctacctttcactctgtgttttcttcctctcccattttcctggtggcattcaataaagcagaattctgatttctgcaatgtaggccaccttagagcaaaatacatgatcaggcaccaccaaattaggctattatctactggatcctgtttaaccaacccaaacccaactcaggctaaatacaggaatacaagaaaacgctgaatttctcccctttctttttttttttttttttgagacagagtcttgctctgtcacccaggctggagtgcagtggcgcgatcttggctcactgcaagctccacctcctgggttcacgccattctcctgcctcagcctcctgagtagcggggactacaggtgcctgccaccacgcccggctaattttttgtatttttagtagagacagggtttcaccgtgttagccaggatggtctccatctcctgatctcatgatctgcccgcctcagcctcccaaagtgctgggattacaggcgtgagccactgcgcccttccctccttttttttttaaaacaacaacaacaacaacaacaaacagtttattcagtaattatgtatacgtattttagcttccaaagtcagtgatggaacaaattgagtcctattaggcccactccattgcatgagttagcatcagaggaggtcaaactagagtgacttcatcttgaatatgggctaggtaagaagaggatgaggcctgctgggctgcattcccaggaggttaggcatttgtagtcacaggatgagataggagttgggtaggaatggtttcataaagaccacaggatgcaagctgggtgtggtgccttatgcctgtaatcccagtactttgggaggccaacgcaggaggattgcttaatcctaggagttcaagaccagcttgggcaacatagtgagacctcatctctacagataatttttattttattttattttatttttttgtgatggagtcttgctctgccgcccaggctggcgtgcagtggcatgaccttggctcactgcaacttctacctcaggggttcaagcgattctcctgtctcagcctcctgagtagctggaattagaggcgcacaccaccacgcctggctaatttttttgtgtttttagtagagatggggtttcaccatgttggccaggctggtctcgaactcctgacctcaggtgatccacctgccttggcctcccaaagtgctgcgattacaggcatgaaccaccgtgcccagcctctacaaataattttttttttttttgaaatggaatctcagtctgtcgcccacactggagtgcaatggtgcgatctcagctcactgcagcctctgcctccctggttcaagcgatttgccttacaaatgatttttaaaaaatgagctgggtgtggtggtttcacaagatacgggtgataaagaccccaggatgcgggccgggtgtggtggtttatgcctgtaatcccagcactttgggaggccaaggcaggaggattgcttaagcctaggagttcaagactagcctggacaacatagtgagacctcatctctacaaataattttttaaaaatgagctgagtgtggtggtgcaggcctgtagtcccagctcttgggctaggcatgggggtcagctcaggtgggaggattgcttgagcccaggagttcaaggatacagtgaactatgattgtgccagtacactccagcctgggcaacagtgcaagaccctgtttcataaacaaattaaaaaaccccaaaaacctaggatgcaatgaagaaggaagccgaaacccaccaaaaccaagacggtgatgaaagtgacctctggtcatcctcactacccattatatgctaattataatgcattagcatgctaaaagataccaccagcaccatgacagtttacaaatgttgtattaatgacaggaagttaccctatatggtggaaaaaggaaggaaccttcagttctgggaatttcctccctgtttctgggaaaatcatgaataatgcacccttagtttagcatataatcaagaaataaccataagtatactcagttaagcagcgtggctgttctgcctatggagtagccacccttttttattcctttattttcttaataaatttgcttgaattccttcctgggtaaagccaagaacccatgtggcctcccatggtgatctccaattttgggattcaccatgtgacattaggagcaacttagggatctggtgcatcccaggccaagactaacatggtgatttttggggggttatgttaaaactgggggctctgcccaggcccctcagtgtggcttcttgagtcaatacctgggtacttactggccctagcacctacaagttcattcacagttccttctcactgacttcaccagtgaccactatcagtgacttcaagggagaaatgaggggggagataaaataaagtgaatggggaagagataaagaagagaggtcttttcacagtttgccagaatagtcccttcagtggttttaccccagggcaacaggagcccccttttagtttctttctcttttaattttcttttcccttcccactttttgcccactttttgccttatttgtgtctgactcaatttccgtctctttctctacttcttcattcccagatttggctgtagaaaattagaaagttcttgaacttggtttgcacgggtgcttttactttaacatgaaaatgaatgatcagcctccttctaatttcatcctagagtctactgcatccctcctaccccctgcacaggaatttagtcacacttatctctcccactttctctcccttcttcactttctctattgctcctcctttcatgcttgtacctgcttttccatgccctgtttagcctggcttgggatccagcaggttctccaagggttcctgcaagaaccccggctgggtgcccaggtctgagcctggtatgtgcctcagtatcacaaaggcctcctgtaaatgacacacattgttggaagtttcagaaattctaggtcaaaatggcactgaaatattaaggtatttaccccaacccaagcaacttttctaaaagttgtagagagtgtgacctctttattaattgaaacgtgaaaatcagctctagtttggaagctgagaaaaaatatatatatatgtatttatttctttgttgtttgaattcttaatataaatggtttaaaggaccattgaaaactgcatgcaatcacagaaggttttggcttcaggcagctcccgccatgatcttggggccccattgattctttcatctttcaggcgtcttactgtttgaaccttgaattttaacctgggacatgtttgactaaaatgatgctgttaatattttctgttgtgcaaaacacaaagagaactaggctccagggttgtttctatttgctaatgctgtttctgttgacttttgacttttctagtttcccagagctatggggacttcccatccggcgttcctggtcttaggctgtcttctcacaggtacggagcccagtcctctctgagttccttgtttgggtgtcttgtttttttaagctttgtgctgcatgggtttattaccagtactctgcatacacagtccaaaagagtgaaaagaaatagaaaactataggacgttatccagaatgaccacaaaccttcagttccctttgctgtattgcacttactccatttcaaaaggaatgctctccagtggcagttttagtacatatataatgttggcattgaaatgttgttagtaataatgtctaaatttacttactactctcttccttttcctaggacaaggcttctattagagctggattagataaattcaggaatggtcagctgtgggaggtggcacatctgttgtcccagccccttgagcagctgaggtgggatgatcccttaaggccaggagttcaaggttgcagtgcactgtgattatgcctgtgactagccaccacactccagcaacatagcaagacctcatttaaaaaaaatgttcaaaggaaataaataatagaaaattcttgcccaagaaatcatacttgtcttaaatcataactctcttgaggaaagatgcttacattgcttctaaatctcagagtcacctttatcttctctaggaatcaaattgatagatgaatgtttggctcttggaaaatcttaaaaactttcccaccaaaaggatcattggggtaatttgttgaagtgtgtattggactgtcttagttttcctccagatatttatgcactgcagatgttcgccatgaaaccagtgctcttctattctgaggagttagctcagcccgttagtgtctttgtcttacccatttggatatggtagaattgagcaagaccagagattcaacagttctaagctccactaagtataccccatctacagagtaataggtgatccagatgtacttacaaatcctatcttaacaagctttaggaattatagtggtcatatattgaagttgggtgggagtctcacaccaggttccaagggagattacaaatcactaattaataattaagtcataatatctcttctatcagtctcgggtttcttgttttctaagttctgtgctccatgggtttattatctgtactctgcttacacagtccaaaagagtgaaaagaaatagaaaactacaggacgttatccagaatgaccacaaaccttcagttcctttgctgcattgcacttactctattgcaaaaggagtaagtgcaatttcagtctaaataagcgagactgaaatttgagcttcgaagatgaacttagagttttcactcttgggttttacttaccaattgtgaattaaaatccgtatcatctggcaccactgcactccagcctgggtgacagagcaagactccatctcataaaaataaagaaataaataaacaaataaatccacatcatcctgctttggccctggaagtcatgagggagagacggcatgcccgagggctataagaaatggaagatgtggaattcttgagcacagatgtgctttgtgttttcttcagtctgtgtccttgcctccattcttattccatgtgggtttttttttttttttttttttttttttttgagacagggtctctcgctctattgcccaggttggagtgcagaggctgactgcaacctcaatcccctgggctccagtgatcctcccacctcagcctccagagtagctaggactacaggtgtacaccagcacacctggctaatttttttatttttttattttttgtggagaccaggtctcactacgttgcccaggctggtctcgaactcctgagctcaagcgatcctcccacttccacctcacaaagtgctgggattatagacatgagcctctgcgccccagcctcatctcattttaactaaaggaaacctttgcagtgattgtgaaccataaagaacccatatgtgcttgagcccgtgccatcttgggatattttatggttacacataagagtctgaaatatggaattggaatcagacatcctctgtctatttgagtgtttggaggggtgaatctagtggggcttggtggagctatttggaacatttgctgctctcagcagatgcagtggctgttataatgggggagctttcatgggcatccaggctaacggatttttgtgtagaaatggtcattgttcatctaagctgctactgttgcttctctcagttgtcgggatgagactgtcctttctgactgcatcctattcagagcgtgcttccttttgcagggctgagcctaatcctctgccagctttcattaccctctatccttccaaatgaaaatgaaaaggttgtgcagctgaattcatccttttctctgagatgctttggggagagtgaagtgagctggcagtaccccatgtctgaagaagagagctccgatgtggaaatcagaaatgaagaaaacaacagcggcctttttgtgacggtcttggaagtgagcagtgcctcggcggcccacacagggttgtacacttgctattacaaccacactcagacagaagagaatgagcttgaaggcaggcacatttacatctatgtgccaggtgagttggctgggtctccaggaccaagcttcttctcttcctgtctctcctgttaaatgtactaaggttttaaacatatatataaataattaatatttattgcgggaagtttgaaaaatgtaagcgaacacacacaaaaatcatttgtaatattatcaagaaatattcattgttagcatttcagagctgtattaagtttggaaagtcatctttgttatgacatgtcctgtattgatactgtataaacaatctgaaatatactcatctctattcagttcattcaagttgcacacatactcacagtgtgtccagcactgggctaagtgttgagtacacaaaaattaataggtaagccctgtcttggagttgctgatagttcattataatatcttccaaataaacactcgatttttcagattcactatcaacatacatttattcttggagagttggaaggaattttctttttccttttaaaaaagttacatatatatatatatatatatatatatatatatattttttttttttttggtaacagggtctcactctgttgcccaggctggaatgcagtggcatgatcatcatagcttactgcaatctcaactcccttggttcaagcgattctcccacttcagcctccccagtagctgggattacaggcatgcaccaccacgcccagctaatttttatattagttgagacgggggtttcaccatattgaccaggctggtcttgaactcctgaccttaagtgatctgcctgcttcggcctcccaaaatgctgggattacaggcgtgagccactgtgccctaatttttatttttatttttgtagagatagggtttcactgtgttgcccaggctggtctcaaactcctgggctcaagtgatccacagccacctcagcctcccaaagttctgggattacaggcacgagccactgggcctggcctactcctgcattttaattaaaaggacaaaagggtcgagcacaagtgatggcaatttcagtatgcagttgggtaaattaaaaaggactatggctagaatccttggttttagaacaaaacctaaactgtttatgattcttgccatccttgctgttttggcataggtgtgtcttcctacctttctgccttttctttttcagtttttaatgggctcctcttcctaccctctataactacgagtgtccccagggatctagaccctctttactttttcatgatactcttattcatatgaaccttccttcttaacaattaaaaaaaaccaaaaactttgttttgaaaagggaaggtatttagaatgtcactccaacttcattcacacttagattccttcaggaaaatcctctaggtgtggagggattttcccctgctgtgaagagaatggtaggaacgtgaatgtgttaaaggcacacgagtccctgaagttttaatccgtgtaagattgtccaaaaattcttcttgttccagcacagatgccatccaagtagcccctgcatcgctgtctgactgagatctttttattcgcaatcatgcagacgtaggggccctttctgcagctgatgtttgagactgttagaacttcttaccaccgtagcttaagtagctgtttttcttttggaaaggaaattctcaggctccttctccttctttaaattttatgtatttctcaaaggattactttttaataaacagatttctatgctatttttgaatcatactgactataggtggtaagagtttttaaaagcatttcataataaaactcgaaatattttttcctgttttaaacagagttggactgtattattttattgttaatttttgtttttagttgtttaaattttgatttagattcctggttagtatttatttatttatttgtagagacagggtctctctatgttgcccaggctggtctcaaactcctgaacacaagcaaccctcccaccttggcttcccaaagtgctgggattacaggcatgagccacaactcctgtccagtattgatatttatcatcagtattatccatcaggagacaggcaatttggtattattcatacttaaaaatcactttgtagctgtcatgataactaatgccagtggggcaattcttctggatatatgtgtaaaggtgaacttcatacctaatatcaataatgccagtgggatagtttttctggatttatgtgtaaaggtgaaattaatgtctaatagagtcttcattcttttttaaaccacagacccagatgtagcctttgtacctctaggaatgacggattatttagtcatcgtggaggatgatgattctgccattataccttgtcgcacaactgatcccgagactcctgtaaccttacacaacagtgagggggtggtacctgcctcctacgacagcagacagggctttaatgggaccttcactgtagggccctatatctgtgaggccaccgtcaaaggaaagaagttccagaccatcccatttaatgtttatgctttaaaaggtacttgtatcatctccttccttctttaaataagagtaacaggcaaaatcataaggtgcgtgtaggatttttttttttttttaaatcatcatcactggtgatcctaaattctgatttggggatttaggaccccagctaatacaatgtctgtggctataataataagcttaaaattactaaaggccaaagcttgattacccatgcaagatttcatgtttcatcagttgacttcaaaatactgtaaggaattcttttcttacataagcctcttactttcattcacattcctgactatggcggccctaaaaacaaacatacacccagggggttagatgcctagattaattttagtaacttaagaaaagtgatttgaagaaagtagtttagacttcaaccctttgatgtccacagttagtacgcttggggaagtataatacatgctgaggtcaacagatatttcctgaacactatattacatggaggaatgggtagcagcaagagtacactgttttaaaatcagagcacagctaattttgtgccaggcactgtgctaggttctgggaaagtactgagaataactgaggagcagagtggaagagaagaagagaagaaacaattggatagaaacaaagtgtctagagcagtgtggatcagcaaatgttggttgattaaatgaataaatttattagtcaaggagattgtggacgagtataaccataactaacccactgctgaggaatgcggtgttctgtttgattggaatttatttttattgttattattttgtaattctgtattataactatatgcctaattgttgtacaccatctcacaatcaagccttgtgagattttccaaattttatcttgatcaaactggtttgcaaattatttttcagggttttcttaaaaaaaaaaaaaaaaacccaaactttataagatcctggctatcctgtggatttttaggcccttgtatttgttcttttttatagcaacatcagagctggatctagaaatggaagctcttaaaaccgtgtataagtcaggggaaacgattgtggtcacctgtgctgtttttaacaatgaggtggttgaccttcaatggacttaccctggagaagtggtaggtaccctcaaaacgtgcaatggcttggagcagagcaacagggctcagaagacctgcatttgagctcggtctgtcactgatgggcacatcactgagtttctctagaccttagcttcccacctctgggatgaacacatttgattaaatggcctttaggactccttgatcaatgggagagtttgaaatgatagttcctggaccaggcccttcagaatacataaagagtgtgccgtaagccttctttttcagaagtcagacagaaataggaaggttctctggctacaagatatcaaccaaaaaattagaagagcaaaaaaaccactggattttactattgcggagacagtgattgattctcatcgtcttggcttctgtgccctgaggtttgattcatctgatagtgttgattgcccgcaccccttcctcttctgccttgttggcacccaggacaatgtgtcttcctgttccacctcctatgtgcctgacctttgcatggctcaccttcagtgaaccgttatgatgtaatcattcagcaaaggtttaatgaagtttgctcaatcccaagcactgtaccagaagctggttcagtattgcaggaagaagggaggaggggagatggaagtggggaaggggagccaccatgctgcctcttggtcactggagatttacagagtctcagtcattctaatgcattgtcactaagtgtgtaagacagccatgtgtaagaggctatgaatgcccaaatgcaggaatgactaatattcttatggagaacaaaaacgagatatatatatttcttgcctccactcctgacttgtaaatttctgctccctgttcttttaggcatttgacagctttctgtccttctatccattgatctccctccttttatccgtttctctctcccatgcatttgccgctgcttttcatttgtcctggggcatctgataggaagttgggcattttcactattgcctcacaaacttcacacagtgaagggacatttacagtccaacaaatgtacatcttccctgaaatatgaagtgatttggttcttctgttcatacttgattgactttaatccttaacacataaacactgctttctatttataggagacagcaatttttttttccaaaccgaagtacatgctatttggcttacaaatatataatcaaagtattgtttcatacagtatgttttttccgattataaaagtaatgcaggtttattgcagaaactttgtaaaatatggagagacaaaggaaaggctacttcccagagcatcactgtttatattttagggagataaagcttttatttttcatttgtatttctttcttttttttttcttttttcttttttttttttgttgtggagatgaggatctcactacattgcccaggctggtctcaaactcctgggcttaagtgatcctcccaccttggcctttcaaagtgttgggattgattacacatgtgagcctctgagcttgactgagataaagctcttaagtatttcttatccatagataaacattgaataataggtgttattctttaaatggtaatttattacattctttatccttcagcagtatagcacaaacaccttatatgtgtcattaactgtccttttaaaaaatgggctgggtgtggtggctcatgcctgtaatcccagtactttgggaggctgaggcaggagagtcacttgaggccaggagtttgagatcagcctgggcaatgtatcaagactccgtctctacaaaaatttttaaaaattagccaggtgtggtggcatgagcctgtagccccagctactcaggagactgaggtgggaggatcacttgaacccaggaggttggggctgcagtgagccatgattgtgccactgcactccagcctgggcagcagagtgagattctgtctctaaaaaaattaaaaacaaaataaaaaatctcatgattttctaagcagctagcttttattctttaggttttatcttttagagcagttttaggtttacagcaaaattgagaggtacagagatttcccatgtgttccctacacccacacatgtgtagcctcccaccttgtcaacatccctaccatccatttgttataactgctgaacctccattgacacatccatatcatccagagtccatagtttatcttagagttcactcctaggagcgagctttttaaaagtcggttttcttccccttttgctgtagaaaggcaaaggcatcacaatgctggaagaaatcaaagtcccatccatcaaattggtgtacactttgacggtccccgaggccacggtgaaagacagtggagattacgaatgtgctgcccgccaggctaccagggaggtcaaagaaatgaagaaagtcactatttctgtccatggtacattccgctttctaaaatgtcagttgtccatgctgctcgggatccatatgtggtaatcattatttaatggaaactcttccctgtacagagaaaggtttcattgaaatcaaacccaccttcagccagttggaagctgtcaacctgcatgaagtcaaacattttgttgtagaggtgcgggcctacccacctcccaggatatcctggctgaaaaacaatctgactctgattgaaaatctcactgagatcaccactgatgtggaaaagattcaggaaataaggtaaagaaactctctgcccaagtatgcctttttttagtgtgcatcagaggcggactgaggtttgtgtgtgtcttacaacccagacccaaagtcagtctagaaaatgtaacaatctgagttaagagatgcttgaaatcacatccctttaatgataacattgcaaagtggtattagtatgctggtaagtatttaatgagaagatgagaagaaagaactaaaagctctggcccctggggaaagacaggtcactggattcagctagggtggaagaaaggaagtaaaattggactcaccaggattgaatagattgaatatattccctgatgttcatcatccatatcgcaagtagacagatatggtgattacacccatgaggcagttatcacatcaccttacgtgaaagttaacgtcataggcttaatctggaacccatttgccctaattgaggactccacaggaaagaagagtagagcctggctaatcaggagagagatgtgcagtgagttgcttggatccctaccttttaatcagaatggtagattgctctcatctcttaattggtggtggagttttgaatgagtcacccctcagccacagtttcctcatctacaatgtaggataaacaataccttatgtccttcaaggcaaggaattggatcagatgatatcatgaggcctcttaaggttttaagctgtgattagaacccaagagtcagaagatacatctcacagcacccagctaaccagccctatacttttgtcagaaatcatctcagaaagacaaagtcagtcctgtatttcaagccttcaggaggaagaacagagcctttctcatcagttccattcacctcaggatttgctttcttctttgtgaactaaattccacgtgtaattgagaagcaatgtctgagaaaatggaattttacagcctctatagaatagtaaaggaaaaatgaagtgggatactgaatctggaaggctttctgttgacacaaaatgaaggtgtacaacaaggagggcagctttccacgaggaacttccatgaggctgtgcagccagagaggaatagggtaacaaccctggtacagctaacacctccaacacgtgtgtgagcactgtctgcaagccataatccatagcagtggcaggacaggctcgccaactgagtggttctggaaagctgccttttccttttagtgattcaaggatgcttcaacgtggattttttagttcctgttatgagccagtgaatacaaagatgaacatggtagatgggggatctggcttcctggagcttaaaactccaggatgggggatctggctttcctggagcaagaaaaccagtggttttcttggccgaagaagtgaagagaacaaacagcagaggataatttggtaatcagcatcctagtgtgccccagggtactctcttaaggaaatccagtcctggagcacacccagtatggtccagcctgctgtcttcgtaggtctgagtgccccagtatttgcaaagtgttttggagcctatgaaatgctttcacacatacaatctcctttaattaactctcacaatgactctgtgctatgtgtacaattatcacgttttacacacaaggaaactgaggcatggagcattgtaataatacccgagatcttctcactccatgaccaatgcttttcttctccattccagttgctttttcaactgtgatgatttataaaggacaatcaaatgggcacatactatatttatgcacatacatacacacacacacacacacacacacacacacaaccagatgtcatttataatccatgtaaaatatttttggggaagtttctctttaataaagtttgaagagacatatattttttttttttgaagaggcatattttttctaacttttttttttttttttgagatggagtcttgctctgtcacccaggctggagtgcagcggtacgatcacggctcactgcaacctccgcctcctgggttcaagcgattcttcagcttcagcctcctgagtagctgggattacaggcatgtgccaccatgcctggctaatttttttttttttgtatttttagtagagatgggggtttcaccatgtttgtgaggctggtctcgaactcctgacctcaagtgattcacctaccttggcctcccaaagtgctgggattacaggtgtgagtcatcacacccagcctataacttttttttaataggtgatagaatcccgtgcttgaaaaataatcaaacaaaaagagaatgcattgtaagaagcctcactgtactcctgtccccagctgcccagttctcccctcctccccacagggaaacatcttcattagtttcattaggttcttatgaaaccttccagagtttctttaagcaaaatacaagcaagtaggactgtcatatcctgcagaccgctacatacaaatacatagaaagtgtcctcattctatcctccagtgatattccattttttggctgaaccacctaaatgatggatatttaggggaagcaagtattttttaaaaaaggtaaaaatcaaaggtttttattttttatttttttaaagaaaagttggtaggctgtgtttattcattcagaagtcaggccgtggctgaactgatagctcttggagatggccattgctcatctctgaatgtctggttttctcttgtaagaattgtgtgtatgatccagaccttcagtgtgtgcactatatattgagaattccagaagagatgatatggacaagaaaaaaagatgactttactttttacagtaaaaataaaacttaaattgaagagtacaattgtttaaacaattggaacttacttagctactgcttgttgaaacaaaatcctttttttaaaaggtatcgaagcaaattaaagctgatccgtgctaaggaagaagacagtggccattatactattgtagctcaaaatgaagatgctgtgaagagctatacttttgaactgttaactcaaggtatgtaaagggagtataaagataatgctagctctgtagatgagtgtcttccaaggaaagcctggcacttttctccccggtcatggaagaaaagcagcacttaggggagaagcagtgtctgcatatgtcacatatcgggaatacctctgctggactcatgaattcaggtatttctgggaggttctgggttactctagagtaggcgaggaatccctaggctccaccagctagctttatttttgtagagatggagtcttgccatgttgctcaggctggtctcctgggttcaagctatcttcccaccttggcctctcaaagtactgggattacaggtgtgagccactgcacctggcctccaccagcttacttagcacctgcttctcaatctgagaagagagaagcagatgaccttagattgttctggagagttttgctacaagttttccttatagacattgtacagtggtccttaccagaagggagtgcccaagtctgtttacattcaggctcagcacctatccagagtcccagccatgagccaggtgctgtctgaggtgcgctcatgtgatcctcacagtaaaacctgtgatacaagcaacaccgtatatctaatttatttgaccacagatttagaaaagaatctttaaaacctaataacataccacagatgcattttggtaaatgctgctttagattatactttagctgaatccattagttgaatcctaagctataatataattttaagaacctccttgcctttcaagccaaataaccaagggactttctctctctctttccctccctcccttccttccttccttccttcttctctccctcccttgttatctcttttcctttcctttctctccttccttccctcttccctttttcctttctctccttccttccttccttgcttccttcttccctccctcctttgttctctcttttcctttcctttctctttttctttccttccttccttcctcactcactcttttcttttcctttctctccttccttccttccttcctccctccctcactctctcttttctttgcctttctctccttccttccttccttttcctccctccctccctcccttgttctcccttttccttccttccttctttcctttcttccttccttccctcttccctcactctctcttttcctttctctccttccttccttccttcattctcccctcccctcccccctcccctccccctcccctcccccctccccccctcccctccccttcccttcccttcccatttttcttctcaccatgttgcccaggcttgcctcaaactcctgggctcaagtgtttctcttccacctcagcctcccaagtagctggggctacatgtgtgaggcatcacaaccatggacttttcactttcttcactccaggttaaaaacatcacagggataaatctcaaaacaccaaaactgtgaaaatgctgctaaccatgtgggtctgtctaaactggagtgttacttgtacaactggtttcagcccctccggagtgttttgaatgccatgtagatgagttgtgaactcatattccactttgtagtctcatatgttctgggacacgagctattccattctgacttctttctgcctcttgcagttccttcatccattctggacttggtcgatgatcaccatggctcaactgggggacagacggtgaggtgcacagctgaaggcacgccgcttcctgatattgagtggatgatatgcaaagatattaagaagtatggaaaacagatgtgtcttcttctttcgtggtcagaatatttctcccttgacacaaatgatgtcaaatacattttacttattgactataagatagggttttgggtgtgatagcttcagggtgtgtatcttttgtcatgaatagctgtgagaagaaggtccagggctctcattagaccttcaaaatgtctccaatctaaaaacaagagtgaattttaagaaccactgttctaagaagatttttactaccctggctcacatatcttatttggtgaactttgtttggtagtcggactgcatgtaaacataaatgtgactgcttagtcccttatctgcccacctgctgtttggtgggttaattcgccattccctcctccctcccccgagtcctcagccttcttaaatgggcacatgagcaatgtgtttacacttcatccatggtaactggttgtgttcagaagcctcagttgtttcttcctctagacagagactcctcatcttaacttctagggctaagaacagacttggatgttgactggggtttctagtagattccagtgtggagcaggattctaggtcttataactcaatctgaggatcatcgcaaccctagtgacaccctaggggctcttcccagtgtgagtgttgagaagggagggctccaggcctttttgaaggggtgggagattgagatcattaaatatggttgaagttgaactgttcagtttgctcataggttcaagattggggaatggtagtcatattttattaaacttgattatctctgcctgctatgtaaacacttagctttcagttgttcatgtgtgagttattccctcttcagcacatgcagacaagttttaatgttcatctgcatgtaaaataaatcagtgtgtattgccccgaaatgcagacaaggtcccaactccttgccatcttagagtgttcccgtggctccactcattgccatgactctcaggaattggccctatacttaggccctttttctctctagatgtaataatgaaacttcctggactattttggccaacaatgtctcaaacatcatcacggagatccactcccgagacaggagtaccgtggagggccgtgtgactttcgccaaagtggaggagaccatcgccgtgcgatgcctggctaagaatctccttggagctgagaaccgagagctgaagctggtggctcccagtgagttcctcaacagtcaggacaactcatcagctgagccgcatctgccccaggcggaactttgaatcccagataggggttatatagaaatgaaggtcccaaggcagaaattcagttatgaatgctcttaaagtcatgtgggactttgttttattttgttttgttttttgagacagagttttgctctgtggcccaggctggagtgcaatggcacaatattggctcactgcaacctctacctaggacgttgttttagattcagatccaaaactgcatttttgcagaggcccctcaacattttgcttgtctaataatatagctacagtctctactttgaatgtctgtgtatgtggatggagtgtggggaaggatcttctgtctcattgctccttaaaagatagatgaagccaaaagcaatataagcaaaatgcaacttacaaaataagctttataataaagcatatgaagtagaggtgtctgcccatatagtagctgtcaattgcatttatcctattcaaattctgtccacaaggttactgttggagcaactttggagaaaatactgagttctcctgattgaattttgtccccttcttgtataaggaaagagttgatgtagtttcctgggtgtagatggtttgagagatggtactgcctatccctaaaatgaaccaggcagccctcacacttccccaccagcagtgagagattcctggctcagacacagccacactaccttgctgcccctgtgcatgtctgccaggaaacttttcattgtgcctctctctcttgtcacgtagccctgcgttctgaactcacggtggctgctgcagtcctggtgctgttggtgattgtgatcatctcacttattgtcctggttgtcatttggaaacaggtagatattttctcataaaactaaagatctttgaagccaatgagaacaagcatagcaacctagttcagtgcttggcacagagaaggagctcagcaattacatgtggagtgaacgttgttggactctactgtgtccagtcactgtgctgcttcagtgaagctctggtgcactgggactttggtaattcaccagttacctgtcctggtcatttatagaaaccgaggtatgaaattcgctggagggtcattgaatcaatcagcccagatggacatgaatatatttatgtggacccgatgcagctgccttatgactcaagatgggagtttccaagagatggactagtgcttggtaagttccatggggtaacctcccaagactcccttttcccttgcacacaactttacaatttataggccttggcagaatagagatctgagcttgtgcttagtaagaactaggcaatggaaatttgctttcagaaatacatttctgtcttgacagtaagttaattggatcattgcaatgatttttttaaatctctttccataacaaattatagttaaggaaaattttacaaagggagaagagaatatgaagagggctggcaaagatacccaccaaaattgcttttctttagaaatgacacaaattgaaaatgaatttctgtgactaaaaatgagcagatgagaaatgaatgaggacaaccacaaaatgtattttgattcagtacattctgaagatgcattagatactcctttttacatatttggaatatggaatataaaaatataggtacattttgaggcaaaatatgtaaaaataagcaagccaacttatcacaagcatttcaagtatttcaatcctgggctgagaccaagtatatgaagctttagtccaagggagtatttcttttttaaatcacattcctaatgaatgaaagcaagacaaaggcaaatgaaagtagaggtagaggttgtgttatgatgaatgatctaacagtatatatgttaaagaatgccaaatgcaggttttaattatccaccggtctcattgcaaaatacagaagagtttaagtcttcttagagagttaggtaaactgaaatcaagcaaggcaccagagtgaaatcacctttgcaaaaattgtaactgaggaaattatgacagtgaatgagatatgacctaaccaactccattttgctttagcctccaagttgtccttgttccttcctgggcataggccgaactaactttgagaggaacttagtttatagtttgactttgaaaaaaagacaataatagccctttgccaaaacaaaccctctttttccctgggaactagactgcctttgcgggactaacgaattagctacaagattagaaagtatggtttaggggtcactgttgtaaaacctgaggtcagtgcttgagatattttggagaccctgtatttcgatgcaccagctgacaccacccaggtcaataaactggctcatctgatcttggggcccctacctaggaactgactcagtgcaagaggacagcatcagctccctataatttcatctttgacccaaccaatcagcactccccttttcaccccctacccaccaaatcatccttaaaaaccccattcccccagtttcagagacactgatttgagtaatagcagaatagtagaaattcccccagtttcagagacactgattcgagtaatagtagtaatagtagaataggtctcccgtacagctggctctgtgtgaattaaaccctttttctattgcaattcccctgtcttggtaaatcggctctgtctaggcagcggacaaggagaatccatggggcggttataagagctgccccccaatttcaaatatttatatctaagctttctttattttcctgcctatttcccaacaagggatgaggagcttagggagttaaaaagtagtaaaatatggggaaaagggcataattcccattataccaagaggcattgctggtgaagcaatacctttccaggtacgattttcagtaacacagacgtgcagtaagaggcagtgttggctgttagtgtcttttatgagccaagtcttttcctggcttggctatccgtggtgagactgacaccccgggaaatgtttctctcagggtgagctctttcagggtgggacaacagcttcagtgtctttacgtatgtctcctcccaacatgaagctaattgctgtgctctcgggcatgtttagctcttggtagagtggctttcctaacaaatagggagcagtgagcccagcctgaagtttttatttagtcactccttagaatcagtgatattttgaatactgaagtatttccagtggctagtaatttactaagacaaaagatgcccctgtttgcatatggaaaacagaaggggagagagccaggaggtgtgggtgagagccccgaaggcaagaggatcccaggggctggcccagcacggagctggtagacagcgcgctcacaccagggagggctgcaccctcctttctcccgtctgtgttttctttcccttgcaagtgttattcgacaaaagcaattatgctaatttccttccctgtgggctcaattccttttttgacacgatgacttggaggagtcattatgattactccaaacaggaaagacactcgcccagctgtccgcccgcagagagctggctacggtgcagaaagctgaggaggcgtctggagtttttgggtgttaatgattctgcctgcccacaggtcgggtcttggggtctggagcgtttgggaaggtggttgaaggaacagcctatggattaagccggtcccaacctgtcatgaaagttgcagtgaagatgctaaaacgtaagtgctccttcctggggattttttgagcacggggattttttgagcatggggatattaagggaatttctcaaaatcatgcagctagtaaataagacatttaggactaggtcctgattattttgactccaggttttatgtgtatttagattaggtttatttagattgctcttgctgcctgtatgttggaaaattaagagcttgttatttccagtgacttctttttactagaaagaccaggaattagttattagcactgaggccaagtagctatctgcttcttttagacttctggtaaatagaatgatatccaatcacaggattagtcatattcttggtttttttctgagaacaggaagttggtagctcagctggactgatatgtgatttattctttcaacagccacggccagatccagtgaaaaacaagctctcatgtctgaactgaagataatgactcacctggggccacatttgaacattgtaaacttgctgggagcctgcaccaagtcaggtgggctcactgacctggagtgaggattttcactggacacatgtggttgtgaaaactgttcaatcaggcttaaatcctccactctccatccccacacatggcagggaatagaagtcccttgaatggagctgactggtcccttgaattgatggaagctcattggtttttgagcaaaatctgttgccagtccagtcatagccattcatggctctttattaaaaaaaaaaaaaaaaaaaaaaaaaaaaaacttttttggtatcttatttttttctgtgccatatggtctgcaggacaattcatggcttttctgttcttcattttcatacccatctcctaacggcttttgtccccataggccccatttacatcatcacagagtattgcttctatggagatttggtcaactatttgcataagaatagggatagcttcctgagccaccacccagagaagccaaagaaagagctggatatctttggattgaaccctgctgatgaaagcacacggaggtgggtgcaaagagagatgttgctgtctatcattatcttacaggcatcacaaatggaaagacccatgtcctgatagatatcatgtctgcagattcagtgcccaaggtagcaagacttagagtcaaaccaccctgtccagtctttccatggtcatgcagagagatgcatgatgtctaaaggtgttttggactggggtgtcacatgggaaggccttgctgataggtttgaatgagagtgagttagaatgactctgggagctcttctgctatttacatgtgatccacttagacctataaaatgcagctctggccagggatgcttgagttctggaaccttgcaagaactgtctgtggatctccaagctcgaggtccttgctgaacctggacctataaatgacgtcaatgatagtgatccctactgcagaaatctacaagtggctataaagaactctgtaggtaagaaattctgtaagatcagaaagtacaatgaattcacttcataataaattacttggtggacaccaaatgggtgctaaattgattgggtagaaggaattgtatgcccaagccacatggccacacggctcaagttccaaccaaggcttgtgagttgaaaaactgagaaagaataatgacagacttaacgtagtgaattcttcaaactttaagtgtaatggacttacaggtccatgggagcacagccccactgtcttagatgtggctcttcaggatgtgcgggctcctgctaaggatgtgcagggaactggctctgaaaacaagtgaacagtagtcatcatggcagctgacatttgtggagtcctttgtatgtgccaggtgccatgacaaatattccgctagtctttcccatctttgtcagtgggatccattctacgtcttctgaaaagtgcttccttgacccccagatcaagtcattttccttacaagctattgaaacctttcttccttcacaacacagctgagtttgagttgatctgtgtatttattttgttttttacatttctttttttccctatttaaaaaatttttttatttccataggtttttggggaacaagtggtatttggttacatgagtaaattcttcagtggtgatttgtgagattttggtgcacccatcactggagcagtatacactgaacccagtttgtagtcttttatccctcacctgcctctcaatttttccccgagtccccaagtccattgtgtcattcttatgcctttgcatcctcatagcttagctctcacttatgagtgagaacgtacgatgtttggtttccatttctgagttacttcacttagaataatagtctctaatcccatccaggttgctgcaaaagccattaattcattcctttttatagctgagttacatatatatatatatatatgcacacctacacatacatatgtatagatacactgcagtttctttatccactccttgattgatgggcatttggggttggttccacattttttcaatatgtgaattgtgctgctataaacatgtgtgtgcaagtatctttttagtatgacttcctttcctctggtagatacccagtagtggaattgctgtgatgcatgtatttgtgcgactatttgattaatgctcatttccttgactagatcacctcatgtgaaaggtatggattggttttgcttttacccagttagctcccatgcctacctcagtacctggcacataatcatcatctactgaaagtggaatgaccacttcagaagggcaccctgggtaagatttctctttctgtttttacagctatgttattttatcttttgaaaacaatggtgactacatggacatgaagcaggctgatactacacagtatgtccccatgctagaaaggaaagaggtttctaaatattccgacatccagagatcactctatgatcgtccagcctcatataagaagaaatctatgttaggtaaaagtgtctatactcactctgggtgttgggactttccagtggtttaatatgatacttaaagtatttagagggaagtgtatagggatggtaagtgaacctggcagcccacgtggtctctaaatgcaggtctgcacaaccagttctgtgacatgtttccaggtttgtggcctgtaaattgaaaagaataaaagctgacaatgtaacaaattttttaaactttaaatttaatagttttaaagaattttcttggtgtgttcctgcagtaaacattttttaaaaaaaataattatttattctgatataatgaacttccttttttattgctgtctttttcttttttaatgaaaatatggtgattgattttttttaatgcccttacttggcagaattacaagttggctgtcttatgttggttcctcaccttgctttttttcccttaagttttagaagtctctgatgtctatgagttcagtaacccttgcttttacttttcctaacattcaatttgtgataggaactctagagtagataatttgcagttatattttctggaccagtgtttctgttgaatgtattttgaaggtgggtctatctgtttttcaagtacatgaatatgtggcagggttaaattgatttataaactccagggagtccagctgatgcccagaccagatggatcacttcacatctgctcagggtggttcctccagagccctgaactggtcacagacatgaagctggaagtctgacattggcttgtcctgtgagcttgcctttttgggtctgagccttcccattagtcaatgcaaaaaagtgttgagctgccctggacattgttttggaaattattgatgtgctctgaatgttttcaggttcttaagtgaaaggtacaatccatttaaaaaagaatgtgtttgttttgcaaagctcagtacacaatattttccatttctgcggttccaagttccattcacttctcattgccaaatgggtgaacttccaagcgcttttaaaagattagccagtgagagttatcggaaccagtacttcctctcccctcccatattgttaaaaatagtttacattgcttcccaggctgggctggtggagttggcacgagatgtcagaggaacctgagtcatgctcaggcccaagccctgttggcaggcagaccactgctttctggccttccgtgactatctgaaaaaaatcgtgaatggctagagctactcttcacttgctgaacattttcaaaaagaattgagaacttctggattaaattgccttcttcctcgaaaaccctgggacccttccagatgggactaactggggaaagtggacaagttacaaacaaagaaactcaaaggaaagtcattggcactgatctctaagatgctatcacatgtgattggtggttgattttattaacaaattataagcaaagtactacaaaggtggctttaaaaagaaaataaagcaattcacagaaactactttttcatgtagcttgtatgtgtgctccatgtatttcatcatggaagattttagtgtgtgtttatgtgtatgtgtgttttaaaggtagctgagatgatttgctaattatggttgaaaaaaagaaatttaggaggtaaacaaaataattatgtgtaagattggtccttgtggctgtgtgtgtgttttgtgtgtgcgtgtatgtctctgtgtgttttaggctgttcttttattgctataaataaatacttgagactgggtaatttataagggaaagaggtttaattagttcatgattctgcaggctttacaggaatcaagatactggtagatctgctcagtttttggagaggcctcatgaagccatgaagtcatggcagaaggcaaagcagtgcaggcacatcacatggccagagcaagagcaagcgagagagagaaagagagaggtgccacacacttctaaacagtcagatcttacaagaagtcacttactattgcgaggacagcaccagaaggatggtgctaaattgttcgtaagaaatctgtccccatgatccattcatctgccaccagtccccacctccaatactggagattacaattcaacatgagatttgggtggggacacatattcaaactatatcatactgaccctggaccctcccaaatctcatgtccttctcacatttcaaaatacaatcatccctccacaatagtcccctcaagccttaactcattccagcatcaactcaaagtccaaagtcttatctgacacaaggcaggtcccttccacctatgagcctgtaaaataaagaacaagttatttactttcaagatacaatggggttataggcattgggtcaacattcccattcccaaagggagaaatcggccaaaagaaaggggctacaagccccacagaagttcagaacccagcagggctgaaaactccaaataaactccattgactccatatcccatgtccagagcacactgatgcaaggggtggagctcttgggagggatggaacaccctgtggctttgcagggtttagcccctgcagctgctctcaggggctgttgtcgagtgcctgtggtttttcctggtgcagagtgcaggctgttggtggatatattattcatggaggatggtggccctcccctcgtagcttcacgaggcagtgccccagtggagactctgtgtggggacttcaaccccacatttcccctctgcagtgccctagtagaggttctctgtgagggctccaatcctgcagcatgcttctgtctggacaccctggttttttaatatatcctccgaaatctaggcagaggctcccaagcctcaactcttaacactctgtgcacccacaggctaacaccacatggaagcggccaaggtttatggctgtcacaagctgaagcagcagcccaagctgcacctgaactcctttgagccacagctggagctggagtcatagggatgcagggagcagtgtctcgaggctgcacagggcagtggaccctggggctggcccatgagaccattcttccctcctaggcctctgggcctgtgatgggaggggctgccatgaaggtgtctgaaatgccttaaaggcctttttcccattgttttggcaatcagcctttgcctcctttttagttatgcaaatttctctagcaagtggttgcccagcagccctctttaattctctcccaaaaaagcttttactttctctgtcacatggccaagctacaaattttccaaccttttatgctctgcttcccttttactttttttttattttaaagagatggggtctcactatgttgtccaggctagtttgaactcttggactcaagcaatcctctcactcatcctcccaaagtgttgggattataggtgtgagccactgcgcccagcctctgcttctcttttaaatataagtttcaacttcaagtcatttctttgcttctgcatctgactgtaggctattggaagcagccaggccatatcgtgaacactttgctgcttagaaatttcttccaccagatatcctaggtcatcactctcaagttcaaacttccacatattcctagggcatggacataatgtggccaagttctttgctgaagcttaacaagggtgacctttactccagttcccaataagttcttcattttcatccgagaccttggcagcctggatttcattgtccatatcattatcagcattttggtcacaagcatttaaccagtctctaagaagttccaaactttccttcatcttcctgtcttcttctgagccctccaaactcttcttatctctgcctgttacccagttatctttacagcaattccccattccttgataccaattttctctattaggctgtttttgcattgctataaagaaatacctgagactgagtaatttataaagaaaagaggtttcattggcacatggattctgcaggctatacaggcatttgcttctggagaggcctcaggaagcttccaatcatggtggaaggtaaagggggagcaggcatatcacatggccagagcaggagcaagtgagagagagacagagagagagagagagagagagagagagagagaggtgccatacagttttaaacaggcagatcttgtaagaagtcactcacttttgcaaggatagcaccaaggggatggtgctaaaccatttgtgagaaattcacccccatgatccagtcacctcccaccaggccccacctccaatactggggattacacttcaacatgagatttgggtggggacacatatccaaactatatcattgcgtgtgtgtgtgtgtgtataatttttaaaccagatatatgtttctgcatatctctttcctttctttcattctttctatcttttttttttttttttttttttgagacagagtctcactctgtcacccaggctgcagtgcagtggtgtgatcttggctcactgcaactcattgcaacctcctcctccctgattcaagcaattcccctgcctcagcctcctgagtagctgggattacaggcacatgccaccatgcctggctaatttttttgtattattagtagagatagggttttaccatgttggccagactggtctcaaacttctgacctcaggcaatccacccacctcggcctcccaaagtgctgggattataggcataagccaccatgcctggcctatatatctattttctaagatagaatctttgcatagtgatattcatctgtgagatctaaacattctacaaaaaaattaagaaaatatttttggatgtgttctttgggcatgcctctgcaacctgatgatttcctgctgcctgccagcaccaatacatttaatttcttttctgcagactcagaagtcaaaaacctcctttcagatgataactcagaaggccttactttattggatttgttgagcttcacctatcaagttgcccgaggaatggagtttttggcttcaaaaaatgtaagttcaaggaacacagacctttttagacccagatttcagtgagtggagtgtggacggagatgctaggagatagatgttggaaaggccattaataacaggggcctcttacttacctgtctctctccttcatcccctacgcaggtcagggagtctgaaatcatcaggcatctactcttctctagagctttctctctgttgggagtgggtggagtgagaacctgggagaaggccagccctttatatccaggcagacagctccaagtgccaccatggatcagccagtcttgcaggggtgatgctattcagctacagatggcttgatcctgagtcatttcttccttttccatgcagtgtgtccaccgtgatctggctgctcgcaacgtcctcctggcacaaggaaaaattgtgaagatctgtgactttggcctggccagagacatcatgcatgattcgaactatgtgtcgaaaggcagtgtacgtcctcacttccctcactggtcaggctcatcctccttcactttaatctctaaagtcaggtgttgcttctagagattcggtgcctgttttttaaaacatcaatagatttcaaggggtcagtacactgccttggcagcagattgcccaggtttgagtgccagctccaccacttacttaatttggatttggggctagatacttgactgttctgcccctctgtctccctgattgtagtgggaggtgataatagtacctatttgctgagttgctatggggattaaatcaatgaattcatgtaaagtgcttaggacagtgcctggcatatagaaacagcactcaataatgttagctattttatttatttatttatttatttatttatttatttatttattttctttttttttgagacagagtctcactctgtcacccaggctggagtgcagtggcgcaatcttggctcactgcaaacttctgcctcccaggttgaagcaattctcctgccttagcctcccgagtaggtgggattacaggcatgcaccaccatgttcagctaatttttgtatttttagtagagacagggtttcaccatgttgcccagactggtctcgaactcctggcctcaagtgatctacctgcctcagcctcccaaagtgctgggatgacaggtgtgagccactgcatctggcaagtgttagctattaatatgtcaattgcgtgtatgcatggacaagcatgcattcccaaggatggtgtctttacattttaagcttttatcagattttcaaaagccatctgtgacccctaaaatagattggaaccatttgggtttatgtatcttggaggcacagtttccttaaagatactcattttgttgtctacttgaaccattcttcccatcccttccacttctcagcagatgacatagctccctgtggggatatatctgctccctgtaggtacaattccaaatcacctcactgcactggatgtgagacagcttatggcagctgctgcttccacctagagaaagacatgggcctgcatccatgctgtgtgtgattcatgtactcatgtggccgtgatagctgtaatcggctcatagatcattggatctgttcttagttttgttcccaggaatatctaaaaataggaaactggtccattcagggcttacaccttttgggtgaaaattcaggattaatgtttttggatattattcctttggaggacataaaaggcaatattgaccattcatcattcatctagtatttattgagcacctactatgtgccagggactgagagttcagtaatgaacaaaacacatgtaaaagacactcaaatgggacaagataattagcacaagttattaagagcccaaggggaacccttttctatttccactgctgtggatcatcagtgagtagacatgggtttaactgtctccctccttccttgcagacctttctgcccgtgaagtggatggctcctgagagcatctttgacaacctctacaccacactgagtgatgtctggtcttatggcattctgctctgggagatcttttcccttggtatgggcctgacattgctgcttatttgggctgttctgaaacaccactggaaggaaaatgtgttctttcaagccccaggatgtagacagtgttaagataacctggtgtgaggccagtatgctgcagccacctcaaaccacatgttgtgccttattgtgtctgagataggcccatgcaggtggagatgggggtttttgttgggggttgcgtcttactcctggcctctgcccctcctctcctttgggctatgccagagtgacttcctcccactggaagtggtcccaatgacattcgcatcccagctgctttttcattttgggctttgggtcacatgggttcacccatggagagtgggccctccctcacctggtggcgattgatgctcaggtgaaaaggggtacgtggcgggaagggcagggctctcattcctggttgtcattggccagtcttgacaacccaggtgctgaacaacccaggtgccctgggctatccggtgaggtccctaagagaaggatgagccataaccctgacatctggatggttcatctggggagatgagacttacacacttagggataaacagtgtgctgctgatttaaaattgtaatttgagtcttgagtaaagagaaaggagtcctggaatagtgtgggaaggcttcagagagggaacttaacttgacctggccttggctttgaaagtgtgaaatgtttcatgaatttatctgtgatcaggatgtaatagtaaagtgtgtcttcctgccccgtctcctttttcatcctagttctccctccatggatgatcacaatggatcatcccccagtggcttaatggagtcctgtactcccttaaaagcagagaggccacaactttgatttttgctttagctatttgaacatacctggtgaaaaagactctctgggttttaatgattcagaatttctccttgcttttctagttcattttgtctgtgttgatccagtagtcatacacattgaaaaacacttgaacgcttatttctaaagatgtagaatttttgtgatggtacttggacttgaccaacctggagtcctaattaaacttaaggtttgagctggtctctgaagtcaaggagatgatgacactgaattttcttgaaaaaaccagtgcttcaaggctataggatctgaaaggttttctaacagtgttctatcatgccaagtgtttcagcaatgcactgagcgtttgttagtcctggtgttttattgtttggcttttaggtggcaccccttaccccggcatgatggtggattctactttctacaataagatcaagagtgggtaccggatggccaagcctgaccacgctaccagtgaagtgtgagctccttccccatcccgggggcctgtgttcacagtctgtgggtctagggggagggaggggccctgagacttccccctgtgcccactcttgagttctgtccccacagctacgagatcatggtgaaatgctggaacagtgagccggagaagagaccctccttttaccacctgagtgagattgtggagaatctgctgcctggacaatataaaaaggtgtgtttggatctgtgggtggaaaggtctggataaagctggaagttataccagtgagctgtgctgttccgcagttctagaggagcattttcaaaagaggcaaaagactgtgtgatccagtggctgggcttcatggcggtgctccacgagaccctagtagcaatgatgaatgaaaaccctccccttcccgtggggctttcctttcatcttatatgtacagtacctgtaagcactattctccagatgtttgagtatcagaagttagtgtgcagttagaagactcagggcatccatggccattacatcactaatttgagtgcacttaaatccatgcgaaattggcttttaccagcggactggaaggaacaacctcagctgttatctgtggcaccagctggttttttgtggaatgggaagcattgttcaaaggaacaaatgtaatttcttggaaccaggcaggatatgtaaatgaatgaaacaactttctgctgaggtgttgagaggaaaactcagacataacctcagtttcttagattgagattagtccctgtgtagactttttatacttatcatttttcttccttcttctcaaggaggaatagtgttaggagattgtgtgccgaactggaagttaaatgcttctgtctgttaattatctcactgcccactacaactttcacaggtgaggcagtgaggaggcagaaggaaattaaccctcagttggtcaaagatgctctgactggtggaaatgtgttggtgggaagagattgaagttattgttgaaaatagggtcttttcacatccaatgttagacctctccaatgtttaaggatcatgaaggctttgggtattatccacccaatagaaggcctcactgcctctctatgggacccatccaagccctggaaaggcaacgtgatggggaccagaaggattctcagttgtagctactgacttggagaaggggctactggtatcttagcacctaatggcagaagctctttaccattggtggccccttcttcatgttctatgtctctggggatagttgacatgactctccttcaactaagtcccacatcttccaggtagtttggagatatgtacagttaaataatagtaagttctgagtgtctctattcatttttgaggtttggttgttaacacttgattaaatatgttcaatgaatgtttatagagttatgaaaaaattcacctggacttcctgaagagtgaccatcctgctgtggcacgcatgcgtgtggactcagacaatgcatacattggtgtcacctacaaaaacgaggaagacaagctgaaggactgggagggtggtctggatgagcagagactgagcgctgacagtggctacatcattcctctgcctgacattgaccctgtccctgaggaggaggacctgggcaagaggaacagacacaggtagctgtgggggcagcctcggtgtctcacctttcccctcccctataggccctgaaggagaggacccattttcccgataatggtgcactcccggttggtaaatatgtactcagggacaagttgcagaatcctcaggaggtccacgtggttttgaaaatgcttcccagatgattctaatatgttccccctggggctgggagagggatgtgcatgttgtggggagagggacatgcttccctggtggagaatctttgagctaaattctcaggtaatttgatcaaattgatacagaactgtgattactgagatcatataagcctctcctgccattgtcttaaatagtcattgaactggggaaaaagtgaagagaggcgggactgggtcctttgacgctataccctacctgtgaattggaatcacctgcagagatttaaaaactgctgatctacaagcctcacccaaaacaacaaattagaatccctgggggtggtggccaactgctccctggctgatttgtttcttctttcttttaaattttgtattatggaagatttctaacgtgtgcacaattcacatagtatagtgagctgttcagtattcgtcacccagcttcaatgactatgccctctgccagcctggatgcacacatggccatgtctgtctctcctcagcctcctctggattgtttggaagcaaatcctagacaccttatcatttcacccataaatattccagtgtgtgtctcttaaagataagggctctattttaaagaagaacaacagttattaaaaataactacaatgccgttatctcacccaaaacagggacaataaatcgttaaggcatcaggcagccagttaaagttcaaattatctcacaaatattatcatactccattaaaaagtgggcagaggacataagcagacacttttcaaaagaagacatacctgcagccaacaagcatatgaaaaaatgctcaacatcactgatcactagagaaatgcaaatcagaaccgtgatgagataccatctcacaccagacagaatggttattattaaaaagtcaaaaaataacagatgctggtgaggttgtggagaaaaggggaagcgtatacactgcttgttgaagtgcaaattagttcagctattgtggaaagcagtgtggtgatttctcaaagaacttttaacagaattaccattggatccagcaatcccattactgggtatataaccaaaggaatataaatcattctaccataaagacatgcatacgtatgttcactgcagcactattcacgatagcaaagacatggaatcatcctaaatgcccattgacagtagactggataaagaacatctggcacatatacaccatggaatactatgtgttgataaaaaagaacaagatctgagataccatctcccaccagtcagaatggctattatttaaaagtcaaaaagcaacagattgtggcgaggttgtggagaaaaagaaacacttttacaatgttggttggagtgtaaattagttcaaccattgtggaagacagtgtggcgattccccaaagacctagaggcagaaatactgtttgacccatcaatcccattactgagtatatacccagagtgatgtaaatcattctattataaaggcacatgaatgtgtatgttcactgctgcactgttcacaatagcaaaatcatggaatcaacctaaatgcccatcaatgatagactggataaagaaaatgtgatacatatacaccatggaatacgatgcagccgtaaaaaggaatgagatcatgtcctttgcagggacatggatggagctggaagccgttaccgtcagcaaactaacacaggaacagaaaaccaaacaccacatgttctcacttataagtgggagctgaacgatgaggacacatggacacatggagggaaacaacacacactggagcctttcaggggttggggattgggtggaacatcaggaagaatagctaatggatactgggcataatacctgggtgatgggatgatctgtgcggcaaaccaccatgacgcatgtttacccatgtaacaaacctgcacatcctgcatatgtacccctgaacttaaaaagtggaaaatacaaaaatgaaattaaaaaaagaacaagatcatgtcctttgcagcaacgtggatggagccggaggtcactatccttagcaaactaatacgggaacagaagaccagataccgcatgttctcacttataagtgggagctaaaactacgagaacacatggacacaaagaggggaacaacagacaccagggcatagttgagggtgcagggtgggagaaggaagaggatcagaaaaaatacctatcggatactgtgcttattatttgggtgatgaaataatctgtacatcaaaccgccatgacatgtgatttatccatgtaacctgcacacgtgcccttgaacataaaataaaagttaaaaaaaaattatcatacacttgttttgttctgtctgagatccagataagagtcacacattgcacttggttgctatgtctctgtaagttcactatgtctctattttttgccctcttacatattatttgtgaagaaaccatagtgtttgcctgtggagttcccacaatcggcattttgctgattacatccttgaagtgtccttctcaggtgcttctgtcttctctatgtgttgtaaactggtagttagtctaggaacttaacctgactcaggttagatctttggcaaacatgcttcatagatggttctgtgtgcttctgtcaagaggtatgcactgtccagttgtctgccttttgtaacattatcagtcattgggtgatcattacctagaatttctttttttttttttttttttgagatggagtctcgctctgtcacccaggctggagtgcagtggtgtgatctcagcttactgtaacctccacctcctgagttcaagccattctcatacctccgcctcctgagtagctgggattacaggcacatgccaccatgcccagctaatttttgtatttttagtagaaatggggtttcagcatgttggccaggctggttttgaactcctgacctcaagtgatctgccggtctcggcctcccaagatgctgggattataggcatgaaccacctcacccggcctagattctttaactcagcaccaaggtggagctaatgcccaggcaggactgagaatcactggctgacgtggtcagatggaggagaccatgccccagttctccgctgtctttgcatggcccttggacagaggtaggagaaggtgatgatagtggcccctagttcaaggtccaagttgcttgtgtgtgtgtgtgtgtgtgtgtgtgtgtgtgtgttttcctcttctttcccatcagaacattattttggaggcttatgactgtgacctttgttaaccaatttaggtataatatgtagacagcccttgtttatttgtatggactgggtaattttgaaagtatggcttttctattttgttttagaatatgttatgtgatttgaagatgggacacagtggcccatcagtcttcggttttttattatgctttgctcaggccagtttttataacgtgtttatatctcttgagcatacggtgttcctccaagttttgggggtctgcgatggaacttcacgggggtcggggaaggctgggcagtgaatctagggctctctgtctcagatcctttctcaatttggttactttgtgtttgtgggctctgaataatatttgagttgtaagagggttctgcttttatataaagttagaaagtcacattggaataaataacatgagaaaggtgcccagaagttttctagggctacaacaggctgagctgcagaatttgacacgccaggaattgaactttctcagttgaagttcacgttcaagttaagtaacttgtgtggcatcacacagctagtaagtggggggaccattccagacctaaggctttctgactccagaactcccctttcagccacttctctagtacgtaaggagccgtcacctgggccctcaagttgggggttggtgggggggcatttgatgtcaagagagaggggaagagggcattccaggcaagtggcaggagatcctgagaacacagtttggatgctcaggaggcttccgggagagcacctgatgggcctggctgcagcttgcaccctgatgggcctgacttcaccccctgctctgccttcccaggcctttggatcaggcattgcttatgttctcttccactaggattgagtagggaaagtagaaattcttgcagcttgtcagtaactttgatgaaagacccagcagaaaagcaggaaagctgaagagtaaaaatgatgggtggaccttggttttccacgtggcctaccacagcatgtcaggcctgggggcagaatcttgccatactgtgcagcccaaatttgaatgccaaaggctttcgtttgtctctggggggccacagtctaggtctagttctgtgcaggagttgtaatatttgctcttctctccctcctccagctcgcagacctctgaagagagtgccattgagacgggttccagcagttccaccttcatcaagagagaggacgagaccattgaagacatcgacatgatggatgacatcggcatagactcttcagacctggtggaagacagcttcctgtaactggcggattcgaggggttccttccacttctggggccacctctggatcccgttcagaaaaccactttattgcaatgcagaggttgagaggaggacttggttgatgtttaaagagaagttcccagccaagggcctcggggagcgttctaaatatgaatgaatgggatattttgaaatgaactttgtcagtgttgcctcttgcaatgcctcagtagcatctcagtggtgtgtgaagtttggagatagatggataagggaataataggccacagaaggtgaactttgtgcttcaaggacattggtgagagtccaacagacacaatttatactgcgacagaacttcagcattgtaattatgtaaataactctaaccaaggctgtgtttagattgtattaactatcttctttggacttctgaagagaccactcaatccatccatgtacttccctcttgaaacctgatgtcagctgctgttgaactttttaaagaagtgcatgaaaaaccatttttgaaccttaaaaggtactggtactatagcattttgctatcttttttagtgttaaagagataaagaataataattaaccaaccttgtttaatagatttgggtcatttagaagcctgacaactcattttcatattgtaatctatgtttataatactactactgttatcagtaatgctaaatgtgtaataatgtaacatgatttccctccagagaaagcacaatttaaaacaatccttactaagtaggtgatgagtttgacagtttttgacatttatattaaataacatgtttctctataaagtatggtaatagctttagtgaattaaatttagttgagcatagagaacaaagtaaaagtagtgttgtccaggaagtcagaatttttaactgtactgaataggttccccaatccatcgtattaaaaaacaattaactgccctctgaaataatgggattagaaacaaacaaaactcttaagtcctaaaagttctcaatgtagaggcataaacctgtgctgaacataacttctcatgtatattacccaatggaaaatataatgatcagcaaaaagactggatttgcagaagttttttttttttttttcttcatgcctgatgaaagctttggcgaccccaatatatgtattttttgaatctatgaacctgaaaagggtcagaaggatgcccagacatcagcctccttctttcaccccttaccccaaagagaaagagtttgaaactcgagaccataaagatattctttagtggaggctggatgtgcattagcctggatcctcagttctcaaatgtgtgtggcagccaggatgactagatcctgggtttccatccttgagattctgaagtatgaagtctgagggaaaccagagtctgtatttttctaaactccctggctgttctgatcggccagttttcggaaacactgacttaggtttcaggaagttgccatgggaaacaaataatttgaactttggaacagggttggcattcaaccacgcaggaagcctactatttaaatccttggcttcaggttagtgacatttaatgccatctagctagcaattgcgaccttaatttaactttccagtcttagctgaggctgagaaagctaaagtttggttttgacaggttttccaaaagtaaagatgctacttcccactgtatgggggagattgaactttccccgtctcccgtcttctgcctcccactccataccccgccaaggaaaggcatgtacaaaaattatgcaattcagtgttccaagtctctgtgtaaccagctcagtgttttggtggaaaaaacattttaagttttactgataatttgaggttagatgggaggatgaattgtcacatctatccacactgtcaaacaggttggtgtgggttcattggcattctttgcaatactgcttaattgctgataccatatgaatgaaacatgggctgtgattactgcaatcactgtgctatcggcagatgatgctttggaagatgcagaagcaataataaagtacttgactacctactggtgtaatctcaatgcaagccccaactttcttatccaactttttcatagtaagtgcgaagactgagccagattggccaattaaaaacgaaaacctgactaggttctgtagagccaattagacttgaaatacgtttgtgtttctagaatcacagctcaagcattctgtttatcgctcactctcccttgtacagccttattttgttggtgctttgcattttgatattgctgtgagccttgcatgacatcatgaggccggatgaaacttctcagtccagcagtttccagtcctaacaaatgctcccacctgaatttgtatatgactgcatttgtgtgtgtgtgtgtgttttcagcaaattccagatttgtttccttttggcctcctgcaaagtctccagaagaaaatttgccaatctttcctactttctatttttatgatgacaatcaaagccggcctgagaaacactatttgtgactttttaaacgattagtgatgtccttaaaatgtggtctgccaatctgtacaaaatggtcctatttttgtgaagagggacataagataaaatgatgttatacatcaatatgtatatatgtatttctatatagacttggagaatactgccaaaacatttatgacaagctgtatcactgccttcgtttatatttttttaactgtgataatccccacaggcacattaactgttgcacttttgaatgtccaaaatttatattttagaaataataaaaagaaagatacttacatgttcccaaaacaatggtgtggtgaatgtgtgagaaaaactaacttgatagggtctaccaatacaaaatgtattacgaatgcccctgttcatgtttttgttttaaaacgtgtaaatgaagatctttatatttcaataaatgatatataatttaaagttatactaaggtttcagcatttttgtttttagtttaatcataagaattaaagcaatcctgttctatttactttcttagcaacatttgtaggactctatattaggccttttttttttttttcctgagacggagttttgctcttgtcatccaggctggagtgcagtggcgtgatctcagttcactgcaacttctgcctcccgagttcaagcaattctcctgcctcagcctcccaagtagctgggattataggcgcctgccaccatgcctggctaatttttgtatttttagtagagatgggggtttcatcatgttggccgggctggtctcgaactcctgaccttagatgatctgcctgcctcggcctcccaaagtgctgggattacaggtgtgaaccaccacgcctggcctttattaggcttttgatgaaccaatagaatatctaaggtttaagacattatatgagctagattgttccacgacacagtatttgacttaaagatgattggcacttggctcatctttggtctcatcatttttttgattgttcatctttatcctgtggtgttttcttcccctgcataaggaatacaggactgcagtaactctgtacaacattcaactgtcgtaaaagtgtaggaagtaaaatgttaaattatttttttcaccgtgtcttcttccctgtccctgtcctgtttccaagaggcagagctgcaccacttggtgtgtcttttaaacttccagttccctttgtatgcatctgtgtatatatattcccatacacacatctctacgtttgcttcatatctacctaaatgggttctcactttatgtaatcctttgtaatgttcttttttctttcctttttaaaactatttattaaagcagttttagatttgcagtaaaattgagtagaaggtacagagatttcccctgtgtgccctgcccccacaccaacatagcatctccatcactaacattctccacctttgctacagctgatgaacctacattgccaaatcattacccataacacagtccacagttctgttttttttttaatgctgttttagcgatctctgtgaaaagtatacagaggtattagctccattggatcccattatgtaaatgtaccataatttatgcaatcatggtcttgtaaaatggatttatagtttccagttctttgctattaaaatgatttcatgaacatttttgcaacatacatatttgcatacaaaaatgtgttttgtagaatggatttctacaaatgaaattgctaggccaaagggtgtgcagaaataaattgatgttgagctgaagtcttcagataggattgatacataagttcttgagcatctgcacgtgaatcactggctttgcacattacatgcagttttctagtctctgctccacattgcccaggaatcatggtcttcaaaataggattggaagaaatacaatgtggtaagtgtgagagaatgtgggttttgtgttctgaagcat

SEQ ID NO: 464 - DNA, 49064 bp, Homo sapiens
  source 1..49064: mol_type = genomic DNA
agggaggactagggacctcaaaagccttgtctgacagtggagtgggtggagggttgaggaatgctgtctagagttgagggagggagaaattaagcactgggatatgcctcggtgtgaccaaggatcctacagggaaaagagcttaagtagagaaggctgtacatcagcaaaatccttcttggttggactggaagttgcccaaggtcccctctgcaaggtcagcttcaattccctttagcggtgcactggccagctggcatggcctttttgtcccagaagcctggcctatcttgaggtcaccaagccctccctccctccttcacagcagcctcccctagccaacacttcctgccatttgtcccttgggccagtcctgccttcaaagtttgcctgagtatggacttcctgagcatttgagtcctttgatccccctagagccaggaacagaggccagcagaggctgggcagggtggtggttgctgcggggataccagttagcagtgggggtggcaggccataaatccctgggggaacaaaggcagctgcggcctgtagactgtccaggccccttgtgggcaatctgcccaggagactcagagaatctccgtttggtttggaaataaatcccttggggttatatggtaaataaaaatacaattaagagtcttccaaaagcactcaggttcagtgaaacaaccatatctggccatttagagcagtttgcagaggcctctgtgctcgctagggaggactttgccttttatcccatcagcacttggcgttaggcagccaggctagcaggcagaggagagcccctcccttctgctcagggagcttctcagaggctgggcattgggttcaggatccattcagctctctgctcccacccccagggtcatggtttgaagagtgggagggatggggagcaactcttcgggcttccacagttttggcctcacaaggcttcattcatcactgtgaaagaagggctggggtcaggggactatgccgccctgcccatatcattcgcaatggagacatgtgaccttcctggtggagcctcctgaccgccccacctttagccctacctagcccgatgaccagaagacaggcagccagcctggaaaggccaggtaacccagggcagggatgcagggaagacagaggtgcgtggaggcagagctgggggcactctggggctgagccagacagctgcacccctccaactaaaagtgaaaagactgtggggcatgacacgattaggtttgcattacgtgagttcactcctgcagcctgaaggagggtgtgtgtgtgacacgcacaggaagaaagggagccagcaagaagcaaacgctataagggagctgaccgccaggaggcctttgggatgtaagattctttaatgcagaattcctggagttctttaaaaaaattttttttaaataatctttgctctctattcaggttttcctttgtgctatgtgaaaaatacatacaagtaaaaataaaaatatacttgctttatttaccaattttctaaaaggcaaacaggtcataaaaagacacaagcagtcaaacaaatctattgcactgggtaaagaaagtttggtttgcacacaaacaaaccacttgtccagcaaggctcaacaaatcatcacagaaactctgagagcttatttacatatctcttcgggaatatattaaaaagaaggctcagtttaaaatagagaaaaactgtttaacacctgtgtaagcacacacactaaagaaaacatgacttgatgcttggcatcacgtaaacaaattcacaagatgatcctattaagtcaactgcttggcacgcgctgaagctacagttaacaatcagtgagcacatattaaatgataaaataatgctgatggtaaacattcataacagcagagtaagattttggcagttttgtgtttcggtaacataactgtaaccttagatgaacacctatcccttcatgatctgactttagaggcaaggagtttgtaacatctaatggccataagaatgcagactgctaccttatcataggcataggcagctgatgttactttgtaaattaacgaaaaattaaagtgttcttgtgtttatgaagaataggtttaatagtcaggcataagatggttttacgatgaaaacctagtggattacaaagagatttcacctccatcaaaaaacagaaaaccctggtcccagttgggcgtggtggctcacgcctgtaatcccagcactttgggaggccgaggtgggtggatcgcttgaggtcaggagttcgagaccagcctggccaacatggtgaaaccctgtctctactaaaaatacaaaaaattagctgggtgtggtggcagtcgcctgtggtcccagctactcaggaggctgaggcaggagaatcgcttgaacctgggaggcagaggttgcagtgagccaagatggcgccactgcactccagcctgggcaaaaagaaactccatctaaaaaaaaaaaaaaaaaaaaaaaaaaaagaaaaccctggtcccttttaagcctcatagtcttggtccaattttaagtcaactgttcttcagtgataactttgaatttccaccagggaccaatattaaattttctgaaccatctttggaatatacaatgcaacatgaggttttgtaaaaagccgggcagactggcctcacttttccccaagtgtccaaatgacctaaaagtgctggggacactggcagaggcctgaagctgctccgagagaggtcgggctcatgaaaagaatgagggctgtgcacccaacccagggtgcagtgggagaggtgagctcactgcacccctgaaaatacagatgcagtcgcaagctgtcagactgagtggcagtggctgctctcggccaggagatgtgatgtgggcttggctgggtggaagcagatgtctgggtggttccaacggaagaaaaccaaacaggactgggtctcacatgtgttggtcacagcctggtttgcaaagggaagtcaccataaagagatgactgatgacatattttaatctccatattggccatcatggtctgaaaaggagacaagaataatgcagaaatatacagagggtctgtctgcgtgtgcattcatccgatggagttggccacacaaaccactaggcttctttagtccagagcaaatgtttcaactttgttcactacaaacaaaacctatgtcagactgaaatattgaccacaccagaagccaaagctgttggtttgccaaacaacgcttcacaccatttaatgtgaaacgttttgaaataaaactaggagaggctgctatctccatttggtatgtataaaaaaacactctaccttgactaaatgataattcagataaaaagcagtccccaagagaggacaaaatttgatctgatccaaacaccctgggaaagctctggaagccagagtccccagctggtgcagcagacagaggtctcgtcacagtcacaggacttctgggagcactgaggcaacttccctgacactaagaggcgcttagtctttctcaagttaaataacaactaaaatctcttccccatcccacaaaactccacatatatattttatatataaaaacatatttctttccgaactctccccactctccacagttttaagtcgccccttcagaaaactatgttgtttttttttctaaaacaaaaaaagcaacatgagcatatgtgtccatttcagtggaaacagccatgaagatctttcatctcttccaagcaccacctggtgtacctcgctggctgccgggctgaggtggggcaggggttacgtctgctcttcgatcctgtgattcaagggggatccattttcgtcttctttggtgtccgacacttcgctgagtcccagagaaggaatatcttcctcatatggtatgcaaatattacctttttccttgttttcacagtaaacacattccttaaaagaaaaaaaaagagaaatcagtaacaaacttgagatctgagttgttacaaaagtcattcaaattggccgggcgcggtggctcacgcctgtaatcccagcactttgggaggccgaggcgggcagatcacgacgtcaggagatcgagaccttcctggctaacacggtgaaatcccatctctactaataatacaaaaaattagctgggcgtggtggcaggcacctgtagtcccagctacttgggaggctgaggcagaagaatcgcttgaaccctggaggcagagcttgcagtgagcggagatcacgctactgtgctccagcctgggcgacagagtgagactctgtctcaaaagataaaaagtcattcaaactgagtaaggtgcaggtgaccaggtgtcagccaggaggtggctggcagcaaaggccaaaatccctgtcccaggagctggcactctagtagcagagagagacaataactaagaagggctccagaggcatagggtatatagaggacatctgtgattttcaactggacattcacagcaggccaaagaaaaggtgacgcaatgattttgaaacgtgtccacactctttgccactccttcctcaaaaggtggggcctaattcctttctccttaaaccttggctggacttaggcatttgcctctaacaaagagtacctgacttctgattctaggtcctaaaaggcaccttggcttcctcttttcctctctggggaagtcacctgctacactgtgaggacatccaggcagccctacggagaggtccccatggcaaggagctgaggcctctgccaagagccagcagtgtgtgagaggcctgcaagtgaggctcctggaagccggtcctccagctggcaggtgacagaagcccccaccagtatcttaccgtcaacatcaggaacgaccctgagctagaagtacccagctaagccgctctcaaattcctgacccaaagagaccgtgcaaggtaatacaagttcattgttgaagtcactaagcgttggggccatctgccatgcagcagcagattactaatgcagcagcgggtggaaaacagactctaaggcagccagggtgagccacgggtctatttcaggaaaaaggattccaagcaaagggctgggcatgtgcgaagatcctgtggcaggggcctgccagggcagtcggggaaacagccaaggggccagtgtagctggagaggagggaaggagaggaaaaatgggagatgaggtagaagatgtggataggtggtcagatgtgtatggctttgcaaccatttattctgattgaggtggcacagtgctggcaggaatctgaactgtcaccggaggtgacacagggagcagtgagtgcagcttcgaggccactctgacatccagggttcatgccatggaagcatcctcatggcttggacctgtgtggtgatgggcttcatctaccttcaaggttaaacccagacaatctgccaacccaccagctggggcctgataagtagagcccaggatgcctccagggcttgcagggtgcaggtggggaaaagaggtgcagacactgagcccgagggtgggcagaagaggaagagcctgtggggaggccaagaggtcagagggacagcctgaagagcacagggcctggagaccaagggcagcaagagctccctggagagagccgctcactgctgccaatggtccctgggacgaggactgagaagtgacactgtgttcggctgctggagaacttgagaccttgacaagagcagcttccacggtatgtgggagggaggggtcggcagagagcaggagagaggggctggagtgcccacagggccgctggaaggacatgtgcctgagagcacgccagcaggaacttgttttttccaccattatttaatgttctccagggacactgagggtttgtgacaggagagggtttttttttgtaaaatagaaaacagaattgaaagaaagaaaaaacagatttcagcaagtgactgagattagatttttcagcctttttggaaacaacattgaaaagccactggagaaaagttctttgaagtggacctagtgctgtgcctttaaaaacataaacctttaattttagaaatttttttttttttttttgagacagagtcttgctctgtcgctcaggctggagtgcagtggtgccatcttggctccctgcaagctctgcctccggggttcccgccattctcctgcctcagcctcctgaggagctgggactacaggcgcccgccaccacgcccagctaattttttgtatttttagtagagacggggtttcaccgtgtttgccaggatggtctcgatctcctgacctcgtgatccacccgcttcggcctcccaaagtgctgggattacaggcgtgagccaccgcgcccggcctaattttagaagttttaaattgacagaaaagttgcaaagacagtacagagaatccccatcacagagccttttagggccatatcagaaatcgagtcccgtgagcttactgccacgtcgatggctgcgggcaggccgcccgtctgcatccactggtggacctcgcgcagctcctgcttctgactctccgtgaacctgggctggagtttctgtaggagcttcagcttctctctgtcctccttcaaaaccgcttctaaatttcttcgcaagatatttagaaatcggtaagctttcaaatgtcttaagggtatctatttttattctttcagaataatgtagttttagatgattttgtttaatgcaaatttccttttctttaaaaaaattttcatttaaggtaacttaatctccctagtaaagaacccgtagtttttctatgaaaatgatgattctggtcaagatttaatttttctgtattttacaataggcctgggagctgcgtatctgcaggtgtaaccttgtcccctggggctcaggtccacacaggcatggttcatctgggagattcttgccagcaggacggcattcccctgccactggcctgtgctgggctggactacagctgccctggagatggagcccccatatccactagctgaccagaggacttaggggtttgatatggtttggctctgtgtccccacaaaaatcttatctggaactgtaatacccatgtgttgagggaaggacctggtgaggggggactggatcatgggggcggttcccctacgctgtcctggtgatagtgagttgtaacgcgatctgatgggtttataagtatttggcagttcctccttcgcttgtgctcttttcctgctgccttgtgaagaaggtgcttgcttctcctcccttccaccatgactgtaagtttcctgaggcttccctggccccgcaggactgtgagttaactaaacctctttcctttataaattacccaatctcaggtatttctttacagcagtgtggaaacagacctacacagggttcatttttccttcctttctttcctcccagcttcccatgccaagcgggtgctccgcaggggaagggaccacatgcagttccctatggcagcctgatgtggacacagagccccgggtcactgcagagcagcccgctccctgggctggtcacctaccttgacacttggttccttcaagtctaagtcagacagccagatacaccccatttacctcacagggttactgggcaacaaagcaagagatgctggcaccaatgctttgtgaaaattgagcatggcactgtgaaggaggcaccaggagcctgtcttcctcgaaggctgtagggtgtgaatccacatggccccggcttatcctggccacactgcagggccagggccaccctgtactagcctggcagaattgtccagagggaagcctgcttctctgctgcactcagctaaatctaagtctttcagaggggcgtcccgccccatctgaatgaccttgaccttgttgtttctgggagctcctgaaccccatccctccccaggtgcctaggaaaacgctgggtggttaccgggaaggcagctggtacgtcatcatgacgctgctgtccgcatctgccatcagcagccagatgggatcctgcaggacgcacttaatgaaatgctcactttcttccataccagtgttcatttttgctttgtgattattctctgaggagtcaatgcttccaaaatatttgctggtatgacttgtgtcactactgcctttaaaaacaaaaaacgtggtgcgtcaaaacattgacatatgaaattaaaccttgcataatgtgcttcctcaaagtcagaatgatttgagagagcccagtgccttcttaggtattgggtatctatgccggtgcatgttccccttctctcccacttcttgaatgctctgggtaattaggaaacaggatctctgctagtgccatgcaggcgattctttcctgtgaagccctgagcagctcaggtggagctgcgtgttagaagccttgaccttctctcccaagctctcaccatctccactcatgtggaccacagggcactgcagtttcccacaaggggaggcagctggcctggagcgctccctagccagcctcacctgtgcagcacgcctgcgaagggaggcgaggtgaaagctcactccagagaagtaggggagcttcaattttgtggagagtgtgtacatttctggtgcctgagattccagatcacatgtgaaagatcccagcgggtagaggcttgcaggtgctccataccctcagttcacacaagtggaactaaagcaggaaggcaaaccactatctggggagtcagagggctggtcccacaaggagccagggtgtgaggcctgtaggcactgaaatcagaagcaaacagggaggatgtggaattctgactagctagggccagccatgctgaacagggagagtgtgtctgtgtgggtgtctgcatgggctctgacagctgcttggggagtgccggtgatccctgttctgagcacagaggccggcctgtgactctggagcagtgcatcctgcaggaacctcccaagtgcctaacaccccgccagggccaacatacctgccccactcggggaggcgtcgcagcccagtgagccggagcccagagactccgaagcagcagagcccgaggctgagcagaggtcctcattcagcaggaggtttaggaggccgcttgacgtggaaagggcgtcactgttctgtgtgtctgagggttcatcacgctttagggacaggaagcagatactgctgttcaggggctcagtcaggacacagcatatgcagcggggtgggggtggggggcatgagtggggtgagggtggaggggtgctgtggagcggctgcaaggttcacggccagggacggcctaacgagcagaccacgcatcaccaccaggcctacggtgcaaattccactgatgctctatggatgccgtctagttacatttaattttcggagagtcacatggaagacggcaatacctgggctccaggggggaaagcctcaggctgctccttggccacagccccctcctcacatgcagcagacatggatggggaaaacgcctctcacagcacccggtgtgggggctgccttgggattgagggcggggcctggcctggggagcatccctgaccctcctctccttggaaacccagactgcaggcccaggactccagaagcaggagcccggaggtggcaggaggactgggagaagctccacagatctacatgcttgcacttcctcacccgggagccctaggtcctctggccaaggcagggaatcgcctgaggcctacggactgcactgctgctggcgttcccacacacttgagctcgttcagaaacacaagcgtttaactgcaaatacaactaccgtttcattaactggttaagaatctcacacagtgtccctacgcctgcggaggatggaaactgaggtcacgctggttttagggctgtgtccccctccttctccgccttcaccggggccacctgagccaggctccggcgccacaccctgaggagccctagctctggtatttaacctgactgtgctttatctctgaagcgtcatttaaaaagtcgaagcccacaaatactgtcaagtcacatgctgctttctggagtctgtatcacaatctctcctccttcattcagattccacgacaataaaaggcttcgaataatctactctgataggattaagtgggaagcatgaatttctggcacacacattcatggcaaaacctacagggtttggtggaaacctcaatcgtgtaacccccatgtctgaactgaggatgtgcggccggcctgccaggtgtgctgtttgctgcctgctttggggaaagagcatcagaaaatccttacggtcagaggcgccttcggctgctggtcccgagaagtgccaggtttgcagtccgcccctacagctgctgtctctgtggcccctgtggtccccatggctccagtgccaccctcaggggcttcctccagctgcagcaggttgagctgcaggggcgagctgctgcgggactgaaagagcggtggggaggccctacccatggccgatggtggggtggcccgggtggctggacaagcacatggctgtctggggatcgaggtccggctggggaactcaggctgtgaggcagaggccatctcggatgtgagtgtggggtggctcggaaactgaggctggctggggaagaaggcctggggcaggtttggggtccccgaggggaaggaataactgggtagcatgaatgccatgacaggcgccaaaggggcagggaaaggtgggggctggactgcaaactggtgctggaggtccacgggcacagcaggcactgtgaagctggcgtggggaggtgccgggggtgctgccacagtccctggcgctggaaacacgggcagtgaataagctgctggcactggggcgggaaagggcacggctgggcagctggactgggacgtgtctgagggtgaccaggctgtggcgttcaagcccaccagcgggggccgggcggacacgggccccccagatccggtgctctcagatgagtctcgaggtttgacccgcttggacttcaattttctgttctttcctgtttttttccaaggtgaatctattccggaagtatttcttagtccaggggcagctaatgcagaaaaacaaatactcggagttaaaattttaactccaaatttgaagacacctcttcgttcaacagtcctgggtttccaaatgctggcccagggcctgcctggtccaccgagcggttttccctgatcctcagtgaagtgagaaaaatcagggcaaaacatcaggtttttccataaaactaaattgaatcaacttaaattacaagctcttaattgcaggacacattccttattttcttctggtattaaatgtcctttcttttatgaaatgctaatatgataagtggtaatacaaagttctatttgttaaataaatacactaaaaagctgtcatgtctctgctgttccccagtatttgggggaaaaattggttagtgaaatctgaacgggagagccactgacctcctctatttttcaatttataagcactgtcactactgttccttaaagagggatgtttcctctttcacctgtcaaacagcctgagcaagatcagaggggagcattgccttgcaaccaaattcttcctctgcaataacgagtgctgctgagtaaggcattcttcaggaagatggagggactcaattggtaaaggagggactctgggtatgtccccatggcctccctggggagtgggagggggatccagggaactttggttttcctctcacatcacgcggagtgacttggggctcttgcagcaggtgtctgggacatctgtcagctgtgccaaggcagtcccatgcctttgggatgtgctgaagggaaatgggctagtccaaggcaaactcctatgtaaatggaggttttgcaattcagcctctctatctggtgttcttctcacaagaaatctgtcccctggtgggaacagtggctaaagcactgggctcctgggatgtcatgtctgggtctggcagggctgccctaggcagctctgtagtctgtgcactgcataaggctacagagttgtctagggggcaagcaagagcgggaactctgcactaggctggtcccatggggtgggtctgctcatggccatggagtacacctttttctaatttctacagaggttctctatgggctggcagtaactcttgaatctggggaagaaggagagaaaggaaagagtggagaagacataatcctcaaggaagctgtgggcttaatttcttacaaatttcccttggtgcgtctgcccagagacccgggggagctgggtccttgtggtgagtggcttcctgggctcactggctctgatccctgtgccagcgtcccagggggaagggaagaggccccatctctaacaagtgtctgggggtatgggaaggaactgggggatcaggagccagacttctgggccaggaaaggggtgaagaagctcatctattttacttcatcccttgaccttcaaccccccaagtggcacctggcctacacagcagcttcccacaccatgaccatggactctgcctgactctggagtccaaagcccagccctgaggctggcccagtcaggagggtgcatctcctggggagaagggcaccagaaatggtacatccctccttcctcatgtgcccagcactacatgcccactatcttgaggttgaattcgctgattctctggaggtcccgtccaggtggggcccctgcccacatggttactcaggcaagaaatgtggacatggcagcactgccctgccatggttcttcccacctcgggcactagcctgggactattccccagggaatgcaagctgacatcccgagagcacccccccggtgggaagttctacagaaacagatggcgttgccagggaagttccaacagctgtcttatatgttaatgcttctgaaactggacacatttcacattttgaaaccagcactggactcagtaccaacaggaataaagttttttaaaacgcacttttaattcgggtatcacttacttcgttcacttggctgccccttggatctttcttgcaagtagtaatggcagtgggactggaaaatgctgagttttcttatttctttgaacttctgcaggaagctctgctcctccttctgtgtgtgtgcagcgagtacctccttggtgaggcccagcttcttgaagggctccttctcttggctgagaccacaggccagggcagggcccgccaggcagtccagggattctggcccactcgcagcatcttccaccatctctgtaacacaagaacccagggctctggtccacacgtgccctgtttattattttaaggccacactatattcacgaacaagacaaatcattcacgtataaagtaatttcatgatgcctgtggcatgaggatgagactcacagcgttttcatttagctttctgagaaagttcatggcaaaaggcaagaagcagagcaggacagccctgacagccaggtgctcaggaacctggggctgaacaaacggaaacgtggggaaccttgggcttcagctctgctgctgaagatatccctcggctgtccttagctttcagaacaccagaaacttggatcaacgtgctgagtctttccgggtttgggaccaggcatggtgatagatgggaccctatgggcccatggggcagacaggacaagggacaggcagggccactgaccatcctgaaagggagggcttggggactggatcttggacatacactttttccttatcatttccctcttcttagtaaagaacaaattcaggattcattttaatcataatattctaaagaacaagaacactcagccaccaatgcgctcattgtaaatctgtttaccacctgtactggctcctgtccacaaacagggagagctaacggtcgcaccttctgctgggcagaggaaagaaccccaggcctgcccagggaagagggaggtggggcctcgctcccagtgctctccgcaccaattaaaggggataagatcttgcaccacaatcaaccctcctgcgttgatgccagaacagacaactgccactggagggcaccacagggcagcagagacctggacaggttgctgcctgggccctggctggccgcactccaccctgcattttacgtaactggatttcctgaaacgccccctatcgggctatggtggagttcttctgcacttagaaaaatttaagatggcaaacttcttgttttcatggttaaaaatcaaactgctctctgatccaagagcccatagtcatacctaactccggctgcggcttcttgtctcccacatggacgatggtgctgctgtagctgcactggctggtgagcgacgccacactctctgccttgcccggcagtgccagcgaggtcaggtgcgtacctactcccgtgcggctgttcaccctggagggcggctctgcctcttcatgagaggaagggggaacaaacattagtgtgtcattacaatgcactgtgcagatgagaaaccgacacccaagtgcccatacagcttccacaccagggtgcacacaacccatcccatcccatcccacagatgctctggcccaggcatggggtgatttgtccccaatgtttattcatagaagaatagtggaaaagagaaagttctgaaatgggagcagttacacacttaaatcctgaggcctctgcagggaggcgcagcagcttggcagctgcagggcacacttggtgaggggctcttgcctgcagccaggcagcccttctgcaggcctgtggggaggggctttccgacagtcaggagccaaccataatccgggataccctgtttctttcttttttcttttttgagatggagtctcgctctgtcacccaggctggagtgcagtgatgcaatcttggctcactgcaacctccgcctgccaggtacaagccattctcctgcctcagcctcccaagtagctgggattacaggcatgcaccatgatgcctggctaatttttgtatttttagtagagatggggtttcaccatgttggccaggctggtcttgaactcctgacctcaagtgatccacccacctcggcctcccaaagtgctgggattacaggcgtgagccaccgcgcccagccggggtaccatttctaatcctggtggtgaacatcagcaacactgacagcgttgtgttaagcagcctgggatttaatgtgatttatgggccatgttaacattcaggccaagggcccctctgagacacactggaaagagggcctgccctagactgacaacttgagaccagtgtggctgcatgagggggtcagcagacggcccctcagtgtggccgcatgaaggggaccaggagatgtccctgcagtgtgtctgcatgaggggggtcaggggacggccccaggcctccagtagccccactggcttcctgttctcaaagccaaggctctgacagaaccatctttgcctctagttcctaagaagggtgctgacttttgaactactttcatcatttgaaaaacagcctacacccttacactgtgtccacagaagccatggggacgtctgactctactccagaggatttacattatttcacatgtacatggctctacacagattagatacctccagcgtgtggccctgggctgactgtggccttccgcttatcactggaccttagcgctgggacgtttgctgggaactcgcatttcctcttcagggtggcagcctcattgcagctctccaagtacctgtgtgaaaggcatgaaccactggtgaggccacacaacatgagaggagggaaggtgtgtgagatggtggagactcggctggaaatgccggcatacctgatgacgctgtccaagcagctgatctgctggtaggagcaggtgggctggttcttgcaggccaactcctcggggaagctgacccccaggctgtccttttccatggcagggacagctttcttctcagctgggggattagtttgcatttctgaaggaatggcaaaattgttctttcattcatttttctcccacagaaaacgctgtgtatttacaaagcattttcgttctacctgaagacagggctggggactcagaatctgcttcatgagtatggaagcctggggacagcctggcatctggcagccctgtgggcacgagcaccacagtgccgtccacagagagacctggggggggagctgctgcccagcctggtgtctgcttctctctggggtctaggctgtccccaggggtcagggactcagcagtgggagacagcagttctcacttgaactcttaaactttcagggccaatgagagcccacgtactttatgctcctcctgggccaggccagtgttttcaaggtgatccctgctagtaacaattatgatgacaactgcctgctcactgtgctgcagattcgactcttgccccaacgacattcatcacatgcctgtcccctagggaccctcaagcaaagagctgtgtccagctcattagcgtgtccccaacacccagcacagagtccagcaggcagcatgtccaccaacacatccccaaggccaaaagtcctagcggtgtctggccagagtgttccccacgggaggcttcggcctgagcacagagaatgagcaagggcccaccagggggaggggactgggatgcatgcatgtgtgcacacgtgtctgtgtgcatgctgtgtgagaaatacatgcgggacagaggagcagcatgaatctgaacccgcgcatgacactgtgaagctgcctgggaagtgtggcgctgtggtaggaaagggctgctgcagtgggggtgggtcggcagcccctgggtggtactccccacttcagacaggtttggtttgagtgtatgtggatgctgggcaaaccgtcggcagttgtgtgtgtgtgtgagtgaagggtttgcaagtgtaaacacacagccatacagctactctgtacagcaagaacaagcggcccaggccgtggctcccaggcacaccctgctggcaggccagggtgcaggaaggcacactggtcacagctccccaggcctgcacacctagccacaccccgccaggcctgcagggcatcaggtgcccagtgtggacatcagtgcctgcactggctgagtgcaggactgggctgctctcgcctcttggaagctgcagactgtgctgaacgcagaagggggtgtgacacggctacaaggtagactccctgccagccagagtcagcatttaacccaggttccctcttctcatgtggccatactctagtttcagtaaggaaatgttgaatatttttttttttacctgtaacggattttttcttttgttctccagattcatgagaataatgacttctatttttggtcttgttaccatttttacaaatttccttgaagaaaaacaaaatgaacacattattcattctaggagacctccttcagtctgtccggcaaagtgagaacagaggatggctgaaataatttcagcaacacagaaggaaactgtggatgagaaatctgacaggtgtagagctagataaaacctatttgatgatcctaaagaataataaaaaataaagcaaaacggcacattacatttttttttttttttaagacagagtcttgctctgtcacccaggctggagtgcagtggcgcaatcttgtctctctgcaacctctgcctcccgggttcaagccattctcctgcctcagcctcccgagtagctgggattacaggggcgcgccaccatgcaaggcaatttttgtatttttagtagagacggggtttcaccaccttgcccaggctgttcttgaactcctgaccttaggtgatccgcctgcctcggccttccaaagtgctgggattacaggtgtgaatcaccgcacccagcccacattttcttctttctatcctagttaaatcttcacttttgcttgttttgtctgttttaaataattttcaaccaacacttagctatggtttctagctctttcaactcttaagagattaaaaagtcccaagtggacaaagtttagaaaggaagcagcaacagctgcaatcaggaagcccctcctaactgccaaaggttgtcttgagtgtgctttttaactctggagggacatccacaaactcattttctcagggagaatggaaggagacgtacggctctcctccggcgtgagtcctcatggccgttgctgtcgctggaggaggtctggctcataaggtgctcgtgggacccgttgctgcccagactcccgtagccactggagccgctgtgggggacgggctggggagacagcagacagcgctacagacacagccagggctgctgagctatgcatgtggccccctgccaacacaccctgtttcgcagagaggatggcgacccgcctaaggctacatggcagagaccaggggagctgaggtttgaaccccagggtcagctccagaggtagactcctggcctccagccgcggtgccccgacccagacatgcagtcaccgaggagacggcaccaaaggaatgtgtccaacccgctcatcaacgcatggctgcagccagccacgcctctgtggatgggtttaaaacaaacaagatgcgatgacagcttcactccacagtctccgggaactgacaggcaggcgcctactcaggtgtggggttgactgcagtgggcctgattttttttagggaccttgagtacaatgtccctcccttaagtcccactgctctggattagaatgagcccccgcaccactgagaggtcactctggaactatgcagcctgtgtcagagcacggggtctgcacacgtccttcagctactcactcagggctgcagttcagacaaggtcgaatgcaaggctggagagagccaagggtactatggactgtctcggactagcacagtctatgcccaaactgtcccctgggggatgttcagagaatgacagatgaagctgtctgagtgggtgtgccaggaccagggttcagagcctatgtcctctgcagggggctctcaggctgctacctgggaggaggacatgcaggcaccacacccacctgcagcaggagccggtggatctgctctgtgagctcctgaatgctggggtgcagggccttctcctctgtgcaggggtgggctgcaaacacgtcctcattcaaagggcccctgcgtggttttaattcatcttgttagatggggccccacaggaggacctctctggcgtgactgtatagccactacatgctgcctgcctgggtgggccctctgcctctcccctgcagccccccaggctgctgcctgtccactccctactctgcttgaatgaggtccctcccacttgggggcagaggacaggtcacccctgcctagcagtctggggctccagattggtggcaggaagcaaggtttcggtcttggcctctcagcccctccctatgccatctgttgctgggaggtgaggacagcccgagacccccgcccaagacccctgagccacctcgggcccttggagcactcacaccctgactttgtgcctcccaatgatgaaggagattttcctgctccatgggttgatgaagctggaccagctggtgtccaacgtgatgtactctccgttccgggcgcgaaaccgaatgggagaatagtcgaaaggctgcccgcctgactgcaggactaggagagcaaaagccagcattcaggggaaaaggggagcaaacaggatttatagtagagagagacaagtcaagagtcactcaggcccaggatcatttgcaaactgtaggggtatgaacacttcttcaaagccactgctttcaacctcctgtttttgctgtagattaccaggaggctgtttccagcaggagctgtttcatcccatgtttcacctctgctagtgtcacttgcatctatgagggctgggcttggtgaggacatgcactgtgcactcccctggcctggtgagaaccttcctagccacagatgaactggtctcccctcctcccatgcgccactgaagccaacagtaaacataagatgctacggactcaggccacggactgagaaacaactggccacaaaggaactcacatgagtttacccctctctctcgactccactgggcactgcagtgccaggagggaggcggcgaggcgggcgtctaccacctgcttgtccttagctgatctgacctgtcagagctagactggtcccaagaagcagccccaaggacacaggaacttccgccaaacacttcaggatgtaccatgaaaaggggacctactctttttgtggatggccagcatcaagggcctgtcactagggtggagctgcacgagcactggggtttcaatcaggtcctgaggtaggtagcccaggagagggaccgccctggaaggcaagcagacacacgctaggattggcatccaaacagatgaggagattgtcactaagaaccatcttattccctggaaagagaagatacactccaaaccccaccccctcccccacccccggagatcaaaagttggactaacagaaccagctagacttttaatcaatagcaaacgaaggttcactgtccaggacgctgaaggaggctccctctgctggggcctgagtgcttcagctctgcgtttcacctcccaagagataagtcatgatcatgcttttgttttcttccttccagcatctttttctttttcagtgtcattcattagtttggccacatgtgacctggcatggatttttgcttaacaagttttgcctgggcctcggaaaaccctttgtatgtgcttcttttccagcctggtctcgtgtgactttggcctcagcatccagttggtttactgtggcttctttggagtctcggtggctggctgggcctctgccctttgagctcatgcctcctcccagagctgtggctttgctccattgcaggacggagctgaacttcagcagcaccttctgcttctgtttgtgtccagcgccctctgccggctccaccgaccatttcttctcccgatctgcctcttaacacttgttgcatccaaaccaatgtttcctcaaactctgctgcttgtgtagaaggattttccctgtgaatctttagaccatggtgcagaactttctcaagggcctggcgttattctttgatttcctccttcttgtctgaggctctctcttcaggcctcatgttttcctttggacaggatatacagaatgttcctggcatccgtcccatcaaggccttgctgaaggaggaagaagaggaaggaagaggagaggagtgggggaacaggaaggaaaaagagggggaggaggaagaggagggagcagaaagggggtggagggtgaaaagaaggaggggaggaggagggggagccctggctgtccttgggctttgtgagccaggccacacacaaggcttcatcaaggagagcttgcaggctgtggcccatcatgccaggtgaacctgtctgccaacctccctgcacagggctgagctggacaccaagttggcatgggagtgggttagagacagttctcagatctctgaaggaagaaaagtctccagaggctgctttacatatacggccccaggccctgccctccaagatcctggttccacagggcagggtggtgtccagaagcctgcatctgcaaactggctctgccccaggcagccccgcggacacacctgagccacctggagctggaagtgacggatccctttttacccatagagcctccccaggaagctgtgtggccctgactccaaggatgggggcctgtgtccctgggccaagagtagaggagggagaggtcttgatcctccagcttctaggtgacctggttcattttaggaacccagcacactggtgcttcttggtccacttcctgtggtatcttctgaggtcacttttcggtgactactgccagtggcccacacattttttttctttctatttttttgagacagggtcttttgctgtgacctaggctggagtgcagtggtgcaatcatagctcaccgtagccttgaactcctaggctcagtgatccccctgcctcagcctctgagtagctgggactacaggtgcacaccaccacacccagctaatttttattttattttgcagagacagggtcttgctacgttttgaactcctggtttcaaacaggctggtttcagactcctggcctcaagtgatgctcctatctcagcttctcagagtgctaggattataagtgtgagccactgcacctagccggcccaagtgtttttggagtcttcatgcatttgtggaggagctgggagaagatgcatggtgggggcagaagccactcagaacatgggtgctcccaaatctcactgggactgttcgcacctgctacagcaccctgagggggagacccagagagagggacccaagtggggctctgaggcatggagaaaatcctgtcccctggagaagcctctagcacacaggctggaagatagacttctgctgggatccagccaatggcatctccggcttccaccctgacactggtcccaggcaacagcgcctctgtctggaccattatccactccgaatgggtttatatgggagaattaagacaggctcaattagatcaacagctctccagaaagcctcaattacaccatgtgcatatcttaggaagttttcagtgtaattccataattatttcattgcctgtatataattacatgtttttgtccattatcatgtaattataaaaccaagatgcagtcttggctttggctaaatagcttttatatcaaaaacatgaaaaagggggtgggtcaagaccacgtacctttcatccacatcctggaacaaacaatttggtgtatgggtggttgtaaaaattctcttttcaggaggaattctaggggctgaaagaacagaatattgcacacatttgtgatcctaagaaatgcatatttgatgttatattaaaactaccagaaaacaccctgtagattcagagtaatgagcagctaaagaaaaaaattaaaacatggactctgaacaacagagactgccacactgagaaccttatgctggttgtgggatcgttggccagccttcttagcttctttatatgctagttttagtctagtaaatcgaaactgccgtgttaacaaaaccacacggaccacgtaaagactactcttagcaaaataaagctggaaggccatctttacgatttttttttttttttttgagacagagtcttgctgcgttgcccaggctgcagtgcagtggcacgatctcggctcattgcaacctccgcctccgaggttcaagcgattctcctgcttcagcctctccagtagttgggactacaggcgtgtgccaccacgcccagctaattttttgtatttttagttgaggtggggtttcaccgtgttggccaggatggtctcgatctcctgacctcgtgatccgcccaccttggcctcccaaagtgctgggactacaggcgtgagccactgcgcccggccccatctttatgatgtttaagatgaaactacagtgatctgacacattatttttaggaaaatgagttacatacttggattcaaatttcttttttttttttttaatgagacagggtctcactatgttgcccaggatggtctcaaatgcccaggctcaagagatcctcctacctcagcctcccaaagtgccagaccacaggcatgagccactgcacctggtctggattcagatttcttagcaaatgtcactatactggagaacttcacagtttagaaactagacaaaggtggacaaagctgatagagtaatttgcataaagtgagtcatatatccaaaattttcctcaattcatggacaaaacattcaaaattccaacattttcattcttgaaggagactggtaatttgggggaataacttgttgaactctaagtaccctctctaaaccttactatttggaaaagaacattctgtaatacacgcaggaacacaaaaaacattgcagagaaagtcacatacttaaaatatttctatcacttttaagaggctgtcatttggccgggcgcggtggctcgcgcctgtaatcccagcactttgggaggccgagacaggtggattgtctgagctcaggagttcgagaccagcctgggcaacacagtgaaaccccgtctctactaaaatacaaaaaaaaagaaaaaaattagttgggtgtggcagcatccacctgtagtcccaggtacttgggaggctgaggcaggagaattgtagaatccaggaggcggaggttgcagtgagccaagatagcaccactgcactccagcctgggcaaaagagcaagactccatctcttaaaaaaaaaaaaaaaaaaaaaagctgtcattcaccacagagaaggtggtgaacacagcacagcagactcagctggcttccccgggttcagcagttgcagaatgcacctgccttcagagaatctggagatcatgtgactcgctcagcagccaaggtgagcacctacagttcctggccagggatttcggccaatacaaggaccaaggtgccacaaagcaggctcttaagagggaccacaggaaggacccatcaaggtggcacaatgccttgtaacctctgagcttcaagagaagagcccagatattattttgggggtggggtagccagaagagctaatggaccaagagggtcaaggtgaggtgagctggattctgtgagtgaggtggcagcaggagcagagactgtggtccagaatgctgggcatacagaggcacagcaagccttgtatggaggctgactcacctggagagtcatgtcagtgcatgtctgtctgagaggaagggaaattccaggaaaagttaggatgggccaaggtggggagggagggatgcccagcacttcatttcttggggactgaggaactgtttggggttctggagcaggcagcgacatcagtgcccttcacaggggcccatgaggctgaggcatggggcaggggatgaggatgggaaggatgtagggccccagacttgtcagagctgttcccactttgtggacaaaaggcagagcagccagggaaaggggagaaggggtcacagcactggtgtggataggggtgagagatgctggcacccagatgccgtgatctgccatgggcagggccggatgacaagcagggtgtgctgagtctccagaaagatggagaccctgcccaaggtgaggtggagaggccaaggctggggaactgcagcggggagtccatcgtacagatgttatgtgtgaaccacaggagtaactgagggggagccagagacaacatctgccctcgccctgggcttggctgttaccttcataaccagagtgcactctctctgccagcagaaggcagcaaagctgactctcagcaccttgttggtcccgcaccttgaccaggtagggcgtcatgcggaaggggtggtagcggatttcattctcgtggcttttccggacactgcggagaagagccacgctctaagttgggaactgtgacacaggaacagtcccctgttctgttccctcctcacctgggccccatgccatgctgcaggtgatgtgtacctctgctctgcctgaggagctgggcctgccccctgccctcttcggtccctccctcagtcccatcatactgaagggcaaatcagagttaacacccccaccagtggggcagcctggagcagcctgcaccctgggttggtaaagcagacagaaaaggggtgctgctcccgccaggggtcctcggccctgactcctgagggtgccagggtctggctcggggtcactcctgacagtgcagctggatgctcaatcagtcaccctggtttggaccaagacccttgtcgggaaagctacgggtctctccccagaaaaacgcacagacaaccaaaagacgcagtgctttcagaaactctgtcgaccctggggtacaggcctttgcaagacacagagagaaagtgcaggtccatgaggggcaggttaaagcactccactgctggccgcattcttagcgacctgtacacatttaaaatgtaactgactgtgttttctggtagacttcagaaacaggcgtgctgagtccctgcaggcagggatcacgccccccagcctcaagcggagcagtgctggggtgaaatgtttatacggttttctaatttaagaaaactgggaaccaggcttacctgacacggcaaaagaaagatttctcctccatgcattcttgagtaaaagaatctaaaagagagagcccaaagtcattcatccaaaccaacaactaaatacagtgttcctcatttctcacaaacaaaagaggagcagcagaatcaagcaagattcaaggtgaaaactgaaaatttatggaagcacaaagtaaatcctttatgtgagaaaccttctattacatttttgactaaaattacatagacttcatgagtgtggtgcattacaaattatgcagtgctaaaattttagcaccaggaggcttacattttcaaaatggcacatgatgttgctgcaaacacaccaattaattaaccactgaacacactcacggtgcactgctgcaaacacaccaactaacctgcaactgaacacactcacggtgcactgctgcaaacacaccaactaacctgcaactgaacacactcacggtgcactgctgcaaacacaccaactaacctgcaactgaacacactcacggtgcactgctgcaaacacaccaacctgcaactgaacacactcacggtgcactgctgcaaacacaccaacctgcaactgaacacactcacggtgcactgctgcaaacacaccaacctgcaactgaacacactcacagtgcactgctgcaaacacaccaactaacctgcaactgaacacactcacggtgcactgctgcaaacacaccaactaacctacaactgaacacacggtgcactgctgcaaacacaccaactaacctacaactgagcacactcatggtgcactgctgcaaacacaccaactaaccgacaactgagcacagtcacggatgtccagaacattgacaaagaaagctgtggaggccacagcagctatatcttggaagctaagcctccatgctgatttttgattaaccccacttctgggaaggcctcggagatttcatctacctactgtccctgagtaagagcaggtacttaaggtaaatcctgccctcagggcaaattcctactggttccctctgaagccggtgtgccagtcccacagaagccctgggtctgggggaatggcaagactgggatccagtcttgtctcatcgccacccacaacatgcatggcctctgttcttaagtccctgttaaatatttctttctaagaaaccgaatttgtcagcctctttctttggcctctcagctgcctcagactttggggtaggtgtgcagaggcctggccacagtgaaacagaagccccaaacatttcatgctacatatttttgggatagtcagttctaacagaaacaacttggcattcaaggcttacatcggtattttggtaaaatagtaacttcctttaaaatgtgaaatgtctagtgaaaatatgaaatcaattgggcaacctcatcagaaatgaaggaagaggtgtttccctaatagttgaaagggatttaaaaaacagaaatctctgctttcgtgggaatctaaactaaaaaaaaaaaaaatcttagatctaggtctttcatacatttcatctactcaaaagaaattaggaaagtagaagcaatggctagttacggaaaatgatataaaatcagcagcttggaaaggcccctgagaattcacctggtccttgacttagctgggcagggaggagagctggggcacaggaggccctgaggagagtgggggtcagaggcaccggcagaggcccagaggcaggcacacccccagctggctccagggactagaccagacccggctgggagggcctggctggggagcggagcctggaaatgaggcagggtagacggtggctacaggggcaggcccagcagccaagaaggctgccatccacagtgcagcacacttggcctgcagtgcctcgggggccagcggcatctgcccagggatctcacagtctgtatacccaaagccagccctggtcaaggcaaagaaccctcaggaagtcactctgggatatgacccactcactggttgcagctgctaaggtggcagggggacgcctgcgtgcagggagcagggtgccttgctcacgctccccactgcccccacgacccggcctcccacgactgcaatcacagcaagattccagcttttccaaacaacttcatttctaaaatgcctaacggttttctctctctgaaatgtatggaaagactatttttttctctaaatttattctgaagggacgaacaactgcttatcctttacctttgccagagcaggcagctggcggcccccacaggtgggctctgaaaggtgaggcagggcgcctgcaccacatctgggttgggcccagctcctggcccctttcccgaccccagagggaacaaggcactacctcgataacctcacctgctccactgcacatgctccacaagggaagcttgtacggggaggtgaaactgtggaacacgcccacatcgtgaggcgccaggaactccacaaacttggcatcgctgaaggcatctcttttacagtgaaatatggatgcaacctggtcagagatgtacaggatcttcccagacaccagggacacggccaccgcaaacatatcctgaaaaggaagagtagggctctgatgacaaggtcagatggtgtcggacgccacatccgactcaggcaggcaggctggagggagccgcccaccaggagcgttggaggtggggggctctctgactcccttgcctagccctcaccaaaaaatcctatcttgcctgttgacagagcaggagcatcgccatcttggacaagcccctcattctaaagttcaccttaataaaaaacagcctacatccaaagggcatcagcctaatggctaaggtcaacatgaccataaaccacaaataacatctccaaccagaaacattccaaactcctcccggaccagagacatactagccccgagatgaccccaatccgggccggaaagatgcctgccccaagataacctcccctcctcccagagagattccagccccgccataaacttctccacacacagaaacattccaagcttgtgataagccccctcaccctaaaaccaacatatactctcagtctgtaagagaaagcgctcctgaccaaaatcggccaggagtacctctcaggttttaactaaagaaaacctgtctttgactgccaagctgcgtttcatgtttctttcctctttaactcttacacctgttacagatactgggaggtccagcatgatattatttgaaacaacacatcagggttctatggctggaagaaaccccagctgtctccaccccctgggaggcgccactcaccccgctgtcttggacatggcacctggtgtccaggctgggtgactgggaggtgggggaccctctgctcacttggcctgccctaacaacctccaccagccttgctgtctcccagggttctaggggcttcctggggaggagaggcctctggttgggcccctccagcccaccatgggcgctctacctgctggctggccctctgggctcagggttgggggctgcctgggggttacgctggaggaagaagatgggaaggattagggagccctgttatgaggccagcttcatgatggtcccagcacatgtgggatccccactagccctcacatctgttctcaccggctgagaactcagagtggtagagtaggtgtgtgtgtatgtggcccatgtgccctccaaggggcccacctttgggtgtgcttaagaatgcacgggctttggagtctcaaatcccagctccccctcatgaccgcaaagccctggacaagtgaactgactgtcaccaagtgtgtctcctcacctcgaggacatgaaaacccagagccccccagttcagtcacactgggtttgcccttgcacccatgagctacaggacaaagttggtcagggacgaggaagacagtctcacagaaggcagaagtccagaacatgaatgccacttccagaatcactgacttcacattcttccttttaaaggtaggaacttatctgctgaaaccccaaacactcctgccttacagccaccggccgcagtgctgagctagctcgcctgcaggaggaactcctgccattttagaaagaaactttgcggaaagaggcttacggcattcttcacaatgtgctcagaggtaacgctctccatctcctccacggtgtaggagggcacgtctgctccacaggggtgaccctcgctggacatcagcagctggtaatactcttcattggctgcaggagagacagtgttcactcagtgggcagaacccagcgcttggccggagacagtcactagctcttacaaactgagggctctacttttctcaaatgaaaaggtaggatataaatctcgtcttcctgggacacagaacatacggaaacgtgaaggcaaaacaaactcacagacagaaatcgggatatttttccctgaaacatcagaaggactttgattataaaatgttttaaaagtggcaactacattatttaaggtaatacggtcgcagagttccagctgcctctcatgttctccagaaggggcttttttttttttttgagatggagttttgcttttgttacccaggctagagtgcaatggcgcaatctcggctcactgtaacttccgcctcccaggttcaagcaattctcttgcctcagccttccaagtagctgggattacaggaacccgccaccacacccagctaattattcttttttgttttgtttagagatggaggcttgctctgtcaccaggctggagtgcagtggcacgatctcagctcacggcaacctccacctcccaggggttcaagcaattctcctgcctcagccttcctagtagctgggactacaggcacgtgccaccacgcccagctaatttttgtatttttagtagagatggggtttcaccatgttggccaggatggtctcgatctcttgacctcatgatctgcccgcctcggcctcccaaagtgctgggattacaggcgtgagccaccgcgcccggcccctagaaagtctttaatcatgatggtatattcacttttccacacaggaccacatggcaacccctgcacatctgactccctgggtgatgccatcagacacccccatccaggcagaactgactgcttaaaaaaataacaggcacaagaaacatttgaaagaaagttttcaaaatagaatctgaagaggagggccactccatctgagttcccacgtcatcctgggtgtatccggcgggctctggggtgacaagcctgtctctgggtgtcggtgctcatggccacagcggccctcactccaggcgggagcaaaggggccagctcgaggctgccacttgccctcagggctcaacaggccccggacacatgaaacctggggctgcgttacgagtctgacccaggattctgccacgcgtgtgcttcctgcaatgtggtgaggagacctttggacccacagctgggtctcatatgctttcagttttgccaccttcagtaatttcagaaacaggcacatttctgagtatgctctgaaatcaagatataaactgctggaaagtgtggaaaatgtccatgtggcagagcttctgagctgtgaagttactgtagaggccaacagggaaacaccttaaatggacataatcactggagaacagagcagcccaactgatcagaacgaactttccctttggctcctccttccggaaaagggggcctccacaggcacgcaggcccagagcggtgccctccatggtggggtgctcatcccaggggcaccggatttccatgcggtatctttagacctgaccagcaccgacgagtagcccaggcaccttgttctgtctgtatcaaccctcacaaaatggacagtgggattagggaggagcctgcagagaaacttagaggacacccaaagccaacacccaaaaatgcaagagtccaagctagcacatggcagagcaacccttccacacctggctcaagggaccccagagatgagtgctgatgacctgctcactgctgatgaaaaactacccaaacatttaaaaatatgaagactgcttcaaatacgagtttatacccatgattactagtgaagaactttgccctaactgtacactgtgctttgaaacgactgataatagaatacagctactgcttcacctttaagcctctcagatttttctatttttatgcatgtttttaatgtacaagatccaccagccccttagtgcatgtgcgcaacacatgaaaaggcacagctccacagtcgggaggtgctcacacaccaactggcaggaggtgtgaagatgctctgcagggcaccttcctttcccaccctggctgacactgatggtctctgcctgctcgtcacaacagaccaacacagctaaggaattcttcaaagttctggaggtggtagtttccactctaaagaaaaaaggccaggccaggcacagtggctcacacctataatcccagaactttgggaggctgaagtgggaggactgcttgggtccaggagttcgagaccagcctgggcaacatagtgagaccccatctctacaaaaaatacaagaattagctgggcgtggtggtacacgtctgtggtcccagctactcaggaggctgtggcagcggaatcgcttaagcccagaagtcaaggctgcagtgagctgcgatgagcctcgagttttagaaagtcaacacaatccaagctataatttggggggatttaaaacatatttctataggtttggagcagatgtgcgaggccgacgtacctttcacctgcttcacgctcctgagggcgtacttcaaggtggccagcgtactggccttgcccttggccttcttgtctgcagggaggtggaccttcagctcctttagtgtttttatcagttctttgtgtgtgtccactttcgaagactggtcgctactgcaggattcaagaaagaggcagccaaatgttagcttcctaggtgtcctttcctgaagaaacgtgcctcttgcccattttctcagcctcggctctagagatgttctggtctgggtggccctttgtggggctctgtagattttctcagcctcggctctagagatgttctggtctgggtggccctttgtggggctctgtagattttctcagcctcggctctagagatgttctggtctgggtggccctttgtggggctctgtagattttctcagcctcggctctagagatgttctggtctgggtggcccttggtggggctctgtaggacatctagcagcatccctggcctcacccacaatagaccagggagaccctggccaagtatgacaatcagagctgtcaacagacattgccagatgtttctcgctgggagacaaattgttcctggtcaagagtcaccgctctaacccaactgaatgctggagaagtccctccaactgtgttcttttccctgaagggttagagctaggctttgctcaggaaaggatactggtcgacccatagtctggtgcagtggactgtgcactaagctgtgcccttcttccctgccccaggtaaagaaggactgagtgatgggattacagaggacagcaaagtgacttcctgggacataaaagtgagccatgaacacagagaaaaggggattgtggaaaagggtcttcaaacattaattgaggatacagagatgttagagagacaggacagcggggcactggctgatgaagatgggcctgtgtggaacagagggtgcagaaggaatgatggaaatcaaggtttctcaggcaatgcaaagtgcccacatgccctggacaaggagccgggttctgctcccgaggtgacatgaaaattgacatagggtaagtttgttacaaacacctacgaagggtgaagaatgttccagatgaaaatgcccaagactcaggcaaagtcggcttcgagtagagctgggaggagctacaggtactggagcgacatcccgggggctctggacggtgaggggacacagtcagtgtctgaaaggccagagtgaggctgggttcgtacccacatagccacacagatgggttttagcacagcttaaaaaaagccacgtcactcccagaaaactaacctccaataagaagtctttcaatttctctaaaacctctatgtatgaagttctaattggccttacctgcagccacttgtagatgggttgtgttcagattttgccatcatcaggctaaaggtatctggactatgaaaacaaaaaataaaagcaaaatttagacaattgtatgctccagacacatcttcccctgccatcctaccagtgataacaggctagataataccatggtaagacaattttttaaaaatacaaggttaagataaaactggaatataaaaccttcagacatcagaaaaactaagtaccaggacacagaaacacatgataacaggagccagttccttttctataaactgcccagtgttgtataagcagccactggctgggttacccaccactgctacctcccaagatctccttacactacccagtacctgtctgttggcaactggatctgcgaactcgacagggcctcgttatgaggaaggacagacactggcacattttaggtattttcaaaaatcttgaaaaacttggtaatcatgatttaaagattgcaaaagcaatcaaatcacagcagaaatgagccactgagaaaacaacctgcccagcctccatctggccagaggctgaactcacctctggcgggcatccggtggctccaccagcatccccagctccttcccactgtcgtcacagtcactgccctgcgagtcccgccccgtggagcagttttcgttggtctcatgtccactggagccactgctcatgtccacatcttcctgcagtgggacctggctgggctggggctccacgggctccttggtggggttactggggctgggcggaaattccgcgtatccattcatgctgggctctggaacgaagctggcaaacagagggatgctgtcacgcattaacaagcacacgcacaaggggcgctgcagccatcaggtagagcacccatttgactctttctgttactaatgaaactgcagtctctttctttcttctctctgtctctctctctctctctttctttctttctactttggagacagggtctggctctgttgcccagggaatgcagtgcctgggctcaagcgatcctcccacctcagcctccagggtagctggaaccacaggcactcaccaccatgcctggttaattttttgtatttttggtagagacagggttttgccatgttgcccagactggtctcgaactcctgaagtcaagcgatctgcccgcctcagcctcccaaaatgttgagattacaggccaaccacacgcagccaaaactgccctttcatcgggatcaatcacacgcacgttagttcatcacattacttatttgttcttattgacaagagctcctatctgccatggattaggaagatggttgaatgaggcagcctcagcccgacatagagctgctgacggcctcatcagaaggcagacaagagcactgataatcaacacccggcctgtggggtgctgggaaaaacacatggtccctctgaataggtgatctgccttttataaatttccccagatgatggtggggtgggggagccgggttcagaaatcttggccattacagcacggcacagttacaggaggaggagccaaggctagcaggagacatggggacagacagggcttgccgggtaaagagggcagaggggcctggcaggtgtggaaccctcccagcagctcggggatcccaggccccacaagcatgtacaagtgggatggagaggggccaggacaatgtggcttcacatttactgggaatggttgggagctgctgaggcactctgagtgccaggcccacggaactcagcttgcatttggacaggcttgcactgctgtgctggtcagaaacttaacctctgcactttggggtaggtgggtggagtggctgaaattagagacagaccagcgatcatcctggacacaaactgagggggggtgaacagagacagggagtagggaggggtgggactgattagcaggtgagaggccaaaatgccatcccgggtcctcccttcttcacccagtgatgtctccccatccccaggacagcgttttcagcagagtcccagcaggaagcaggcacccactcaagcggggcactggagagagccagatgaaggccctgcttgacacaagtggtcatgcttaatgaacacagctgtgaggctctggggtgatgctgctgactacagacatgatgctaagcacccaacacacagcttcccagcaactctggatcacggtctacatggtgcgcaggagatcgttctacggagcagccaacaggggtgggtagctcaccccaggccacacagtagcagatgacagccctggattccaggcctgccggcatctgaagatgggacccccaccctacacccaggctcagctgtgtgggggcctcctgcttcctgccactgcactgtgctcagccccaactctggcccagtgtggcattccacttctgcatggcatccgtttggcccttcccagggcagctggaacaaagggagagaagggtttctggattccacaccccaaatcttgtgaaacatcttatgctccagttcccatctagctctgggagagcctccccttccacctccttcccaccagtacccacgtgaaatgaccaaggatcatacaattggtcggggggagggatcattttcagcagccctagaagtcccgaagggtcccaatcatttgccacaaagtgaaggtgcgtccggctgcttgtcgctgagatggaaggagcatgaagagtgcactggagtccaaatacccctgaggaagtggctagtgctgagatccctgctacccccggccatggaaggcccaagccatggccaaggctggacagtcaagagctctaccaccaggaagatgcttcgtgaggaagctgtgggagaagaacggacacaggaacagaaatcctgtgggaaggagaggttctcctggagacgcttcacccactgaacacccccaggtgccctccccaacagggcaactctaagaaagggctagaaaccagccagcaatactgagggctacacatacagggtgccggattccaacagctggccccaggaactgaatggctaagctccaacaagagccttcagcatccccttccccaggtcgagcccattcgccggtgagccactccaggacagcctggtgagaggcggggctcatggagaatccacccacatcagtgtctggagaacagcagggccgactagacctcgccttgttcacaaactaataaacagaagaaagccaacacggggctgtggaaaacacacacagcaaagacaactgaacacaaccctcatgccacagaggaagcagcaaattaagacaccatctacttttcatcctaagaattcaagaaatgatggattcaatgaaacaagtaatgagggatgagataaggccactgactgagatgaaaatgccacattagaatggaaaactagaaaggacaaagttcagaatcaataaaaagaaaatggcttcagtgataggagatgcgtgacagacttttaaaatgcaaagggaaaggagaagagaagagagatggaggacagccgggttttacctgtggattacagctctttctgaaagagacgagaacaataaaacagaaaccataatgagcgagacacataaagagaaccatcctgaaccagagacagatctgaatctgccaatcaaaggacaagagtccaacgcctaagtgcatccagatgacaaacggtatcttcaaggataaagaaagtcctaccaacatccacagagaacaaacaagttacccataaaggatgaaaaaaaaatcacactagtcttggatatctcttcagcaatattacatttccagaagacaatgtttacacttttttttttttttttgagagggagtcttgctctgtcaccaggctggagtgcagtggcgcaatctcggctcatggcaacctccgcctcctgggttcaagcaattctcctgcctcagcctcccaagtagctgggattacaggtgtccgccaccacgcccagctaatttttgtatttttagtagagatggggtttcaccatgctggccaggatggtcttgatctcttgacctcgtgatctgcccacctcggcctcccaaagtgctgggattacaggcgtgagccaccaggcccggccgtctacatatattaatagctttgagaggaaaagcttatggtcaaagggaggaaatctcaattacaggatacttgattgtgggttacatagctggttttatcaacatcctgagtcacataaaacccaaaatgccagcatcattccccttaaagtcaggaacaaaataagcaaatctgttattctagtcttttttctttattttacatttaatggcagttctagcaaattcaatgaaagatgaatggtaataccttttgggaacagagagactaagcaagaagactgcctaggccattcccacaaagagagacaccaaaagatttgtgaacttgtagaaagaggctcaacctcattagcatcaggaaaatgcaaaggacgaggttatcttgcccatcaggttgccaaaaattaacaggactgatcacactcagcgttgctcaggtggagaagagtggctcttgtgtgtggtggtgtagtaatagggtatttctggagagaaatttgagttcccagcaacatttataatctgcatactcttcccacctccaggaatccattgcagagaagtgcttatttatgtgctcagagatgtgtgagcactgaatataaaaacctgggaagaaccatcaacagggaggctacgcatcctgtccacgatcatcctggccaggagccagcctccaattccagactggtcccctgcctccacctggccctgctatggttaacacagcatctagagcgatcctggtgaaggggcttagcttacgcccggcccgtgctcagacccttgctcagagcacaattctagtgtgcacaagggccaaaggctctgcaagtctagctcctgcaatctcctgggcatgtcctgttaactgcccacccctcagccccagccctgtgtgctctgaccacagagactctgcacttgctgctccctcgtgcccacagccctcttcttgcagatgcctgggcagcctgcatgaacagcaccgtctccccaccagctccttctctgtgcctccaccgccgctctgtgggctttcctcgccagcactgaggggctgggctgtttactgcctgcctcccctctgggacctaagctccatgggggcaggggtttgcgttggtcaatgctggatccccagggcctggcacgtactgttgaagacacaaacctgggacatccatactatgaatactatacacccactaaaaggatagaggccagaaagactgatgtggggagagtctcagacatagatgaacaagtccaagaacaataaataacaacaacaataaaaaggacagatggcactcaggcagggcctgcccggtgccagcagtttcccactgactgacttgcccttattcgcttagcactgagggctggcactggggcagacaacagagcagacatctttcctgccctcagggagcttacattagggggaaacagacaataaacaagaaactagaatatacagtagagtaggcaactagcaagtgggaattgaggggctgggagtgacatttcaatgagggtggccccaggtgtaggtggcatttgacaaggaccttgcgcacgagccctcgtgtgtgaactgactcagggtccctgggcttcgctctctcaggcttgcagccacgtgcttcagcaggtctttctggcttcacacctgaggctggcactgggcatctctggctctgcctgccctgtgtggactcggatgacgtgccacaccactgtgggggcccttgctgctcctcactgtcctgcctgctgccaaagggtctgatgaggcagctggataggagggagagctcgcttgctggacaggaggcaaggaggagctggcagaaaatgccccctccctctctccctcaaatggacctttctgaagttgtctttctttccttccttcctgttttggcacagcctttctgaagaggtcccaagggggtgagcacccagctggatgtctctgtaaggcagagcctcatctcagcagggtgtcgtcttgtgtgtgctttccagacttttcttccttacctcccttttccttttctactgctaccctgggactgcaattcccagtaaagtgctcacctcagactccattctcaagagagcctgaaggcagacctgaagagagtggagagtgagctaccagaggaagaacattctaggcagggggacagcacacacaaaggccctgcggcaggcaagcacctgacctgtctgaggaaggtgcacgaggctggagcagagcgggcagcggtaggagggcggcagcaaggccagatcacggagtgccttgcgggggcagtcagaactccgatagggaactgtggagagttctgtgcaacaagatctcacttacacttcaatggagttgcagggttgaggcaaggtggaagcaaggagacctctcagggtgctcttgccatggttcagtggagctgccaaggggccgcccagggtaccaagggcattctctcactcctgacccctcaacaccctggacaccacccatctcatccccacagccctcccccagataagcagctggtcctttctgctctgagtgagtcattaaggtgatcagaggcagcagcagagtggttaagggcacaggtcctgggtggcctgggtttcagctgggttccaccacctcctatgtgatctcggacaagttccttaacctccctgagccttgtgtcctcatttgtgagatggggtaacagtagttcctgcctcctactggttgttagaaggattaaatgacacaacccatgcaagatatctggaatgtaatattagcttatcactgctaatcactacagaaaaacagacggcggctgggcgcggtggctcacacctgtaatcccagcattttgggaggctgaggcggtggatcacccgaggtcaggagttcgcaaccagccagaccaatatggtgaaacccgtctctactaaaaatacaaaaattagccaggcgtcatggtgtgtgcctgtagtcccagctacctgggaggctgagacaggagaattgcttgaacccaggaggtggaggctgcagtaagccaagattgcaccactgcactccaacctgggcaacagagcaagactctatctcaaaaaaaaaaaaaaaagagagagaaaacgaaaaagaaaaacagatgggcaacaaacgtaattttggaagagagagaatgaattgtcatggcagctgtctctggcttgtattcttatatttaaaggactaagaactcagtgccacctccagcccaggcagtccttagaggagcatcaggtatctgaagccaccatgctgtctgggccccgggtgctttgcacgtagctctcctggttttcacccctaagtccatcccctgtaagcctgtctaaatacgattcactggtgccccgacattaccttaggtggaagataagtatttttgcaaagagggtagagtaagcttggcagaaatgtgaaagccaaattatcagaaacttcgtcattccagaaaatgcgtctctcagcctcagcggctctaatagaccagcctcattttgagaagctggcaaaaccaacgtccctgtcaaagtggactttgcctcctgccctccacagatgtgtgcccatagccagctggaccagctgttcctggggagctcctaggaaacctgtttccacctcaaggcgggtagggggagggagggtgggcatgcacttatgtgctcagggtaccaaagcccaggagggaaaatggcagcctggttgaaaaggggctgccaaaagccaacatgagcctctgggcgtgaacctgcccttgaggccctctttgcatgtccgcctactggctctgcccctaagaacagtcagactcaaagaaagaggttaagctcggacccctgaccaggtcacctggccacatttttggtagctgggttgcctcaacttgacagagcaccattcagaaagtgcagtccaccacaagaacagagagcctgggatcaggaggaaaagcagctggtgggggtggggaaggagtggggccaggagcagagactactggctggtggggtcgcatgggttcgttaccctatcctccccactttcagagatactcatactttccataatagtgtttaaaaattaggaacgaaagcaagcctgggacccagttccagcctccactgccactgccaggactggtaaagtcttactgtactcaatacctgcaaacctaaggcggaaaagcattttttgtggaaatcagaaatcagtgttcaatcaccagaggagtcccacctcatgaggtcacagcttgatgtatatccacaaacaacatgccatgtcacatgtcaccagaggcaggacagtgccagccccccagaggctcctggtggccctcccagccaccatctaccccgcggggactcactagcttggcttcttgcagcctagtgaattctgcctgttttcgaactttacataatagggctcatacagcatgtactgtctctgcaagccctgcaggattttacaaccccaaatattctaacatgttttctacttcctggtaggagccaactccctgaggccagcctgctgtaatcctgagaaaatgtttgtcctgctaaataaacagccgcactctccatggcaacggttgggtaactgaggaaaatgtgaccgcagccatccaaatatggagggaaggaggtgcaccggggaggcattgtcttggcctcactaggacaccttcaatgatctcaattcagacttttaaatccctacatttttagaactacaagactttaaagcaaataaaggcaaaagtgtcagcctcctagctccccggtggtcagggactgagctactccgaattgcaggaagctcaggcatctgctcctcctgtacctggtttcttaaagagtggattctgattcctctatgtcaccccaggaagagcacgaggaacccttcgaggccggtgagggttcagcacggcagctcactctgtcttgggaactaccagtctctgaaaaccaagtggccttgactcctgtcaccagtcactgctattcatttactgcttctaatttgctctagacttggagatatggtaacaaacttgttacaaatgtgtacacgatgagcataatgagttgaaaggagggcctggtccctaggggggagtgcgtgggctgggggaggggtccatcagaggccccctctagactaattctcccttggttcccaaggtgggccagctttccagaagtgtggcgacagtctctgccaagcttatggaattgtgtgtttctggctccctctgccaaacagagtagttttcaaaaggtaaaagcacacccagagcctgtctttcttctgactaaacgccaagtggccctgccagctgttcaatgacctgacagagccgtggtttgccgagtcctggtgaagttacatcatcgcttaaaaacagcagtgtgactaccagtatttttgagaaagttcagtgggtacgagaagtagtgcacaggagaggaatctttcctttttccttgtaagcactgcagacgtggctcacaggagaacattacttggcccaaaggcaagagcatatcagaagcctctgtctcctgcgagaaacctgggaaaaatcatctgtagggtaacagaaaaccaaaaacctgggaattaaagtagacctctgagactgcccaatctgagcccctccaaacaaacaaggaaactgaggcccagactgggagccagcagcagccagctggctgacacagggctcccccttcccacctggcactccagtctccacagaaagccagggctgcgttagttctgtaccaatgaatcataccaaggcgacagtgacagataactgcaaacacccacggtgccatccccgcgctggcacaccacacagcttccactcaaaaaaaacggagtccctttcttcattatagtcatatagcacacaaaaatcaattcaccttgtattttaaaactcaatttccaaataaagccttcaggtagagtcctgttttcttctcaggcacacccagcctgggaccagaagccccaggtgggggtagagggtgggccaagaagtctagcagtcctgctgtgccatatacaggtgagaggcgtccatgtggggctttagccaccgtgtggggttcttaacacatttcccggacttaaggcccttcctcccaaattccagcccacccaggattcagcacgcaagtggaggccatcactgaacctctgaagctcatcctgccccaggacgatgggaagatcctgcagacagcctgggcctgggcctcagtttgctcatctgtcaggctgaggggttactctgggtgattttcagggtgccttctggctctgttgttctgtatgaatcagctttccaaacgggttccttctgtgtaggttacagaaaccctggcaaccaactcgtcatcccttaccctggccttcctgaagggggaagcaggccacctcccaccccctggtctatgtctgggacttggcagccaaagtacatcccagaaggtaggcgcgactgctgcaccaaagagtggacacccccattcccttctatccagtccggggaaagggaattaatacagggtggtccaggggaggcaaaggggcgaacattagagggtctccccgccctcaggttcccaggcctggcttggcaccgggacttccttgtccctctgatcacccattccaggagacccgtgggtgtccaggaaaagctcctagatcagcgcccctccatggcccttccccagcccaggacttagccctgtggcctcagaagaggcagtcagctccccgagggtcctccagatcccagggccggctgcgctgacccttggtttccttggccttccccatgcgaggggagggagggttcccaaaagagaatcgcccacggaaccgcagcccgcgcgcagtcactcggtagctcggtgccctacacacgctgcctcacctttcggacctcaggctcctgagctgcgaagcgggggttcgagtccccaaccctcggtgtcaccgcagttcaaacgagcgcaccctgcgcgcggctcgaccactctccacctgggacagggccaagggcacacgcccccacgccggcgccgtttcaagccgaggagtccagcagcccaaggaacttccggcggcgcctccgctgcccgagccggcgctgggaccccgacctgcccgaggcccgcgcgccggcggcggttacgtaagccgcagcggggccgcgccgcgccacttaccgccggccgcgcccgcgtcagcccgtccgccggtccctccgccgactcgcggctctgtccgcccggccccgcgcccgccgccgccgcccacagctgcacgtatcccctcagcgccgccgcctccgccgcggccgagtcgccgctgtcacatagtggaaaacgtgaccgcgcgcgccgcgcccgcccccggcctccgccattggccgcgactccgtctcatctgcatacatgaggggcggggcctacgaacgccgcgcgcccattggtggccgcgcccgtcgctctttttacataagacgcacatggaactccatgttcacctcgtcggttcctcaatggagacgcggcgcgttcgtgctacccgtcgtcctccctagtggtctcatccacttccggcgtcggcgccttccattcactacgccctcaagcccgccagctcggggagcgcggagtggcgcgtaccattgcgggcgggggagctgggcgcggggctcctgcgcacctccggccggcctggcagacccggcgcgccgaagccggacgagggagacctccacctccggccaccggccagaggcgcgcccccagcggccagggccgcgggaaagtccgcgcggcatgcttcattcacgcattcacattcattcatttactcattcactcactcattcatcgcggggccccggagcagcccaggagaaggtggcagcaccgccctgcagcagctccgggggcacgcccacccgggcctctgaggtgcctgtggtcgacacttgtcccggcagctaccaagtgacctttcttatttttgagaccacgtgttgcaatttttggttcaggaaatagagtcattgttactctggggaggtacaaaagaaagaaatgatgttgtccctgcccccaagcgcatcactagggagaaaggactatctcataaaaaggaaacttaatcaaatgctaaattgggcgatgtgggctataaattaaccagagctatccccacaggctccgtgagaaaggcagcacttccaaggcgggtaagatgggccctgagaaagggacgccttacaacggtgcaagccgtagagacgcaggagccaggggtaggaggttgtcctgggagacagcgcgggaccctgcatcaccttgtttcggtaagcattgtgtggggcatgtggagcctctaaacttccatttaaagtgtcaggagaaagagtacaatttccccgggtctgggtagaagcctgagacttacaggacaggaaggagctttcaggctcccacgcagcaggctctgaatgtgtaggctctcatggggaaggcgagactgtccaagaagctggagcccgcagcatctctctttactcttcttgttcttctttacctggactcacctggggaccagggatgggacagaaggaaaagttatgaacccacatcaggaattcctgagtgtgataactccttctcttctacttgacaaggtgtgtgtgcaacttctcagatgcaaaccagggcaaataccaagttcatcggggcagcccttcccacagaagccccgggaggcctgcatgctgttcacacactcagtcaggtggcccctcctcctgttcctctgacattgacacctcgacacactccccgccccctctccctaacacatacacacacaaatgccaagcaaacccaggcccggctgctgcgccctgcacacacccaaaggctcttttgtttcttccctcccattgacgtcaatggggagctccattgttctggaaacaagagtaaacagacagctcatccacaccttaccgagattcttcttcatgcttttgctgggtcttgctccatattcagcctgctacctgatgtcacatttcctccctaaatgtagccttttttatttccaccaataaatctggtagaaatatattgaaatcaattcttttagaaattatcaagtgctttgggctctaggactcttcagaatctcatctattttcagtgattcacagccagtttcttctttcctattattggaaatttgtgtacactccacaaatacttgttgacacctgagtgttgaggggcatgcaaaaatacatctcactgcatccctgcttgtaaggagttggtgatgtagaaggggggaggaggcagattcagaggcaattttgtctaagttgtggtgtgtaggtcctgagggaataggacagccatggacagaagcctccatcccagctccaacagaggacagcgctcaggggatgagctcctacaatcaggccaagtgcatggatgccattcttgctgaaccaagatggtgacagagagagagcgcaaattggggcagtcagattggagaaggaagggggatgaaccctttcctagccagcccacactggccagctgtcacctccagcacggagctcagagctcttggataggggaattgctgttggcactgtgggaggcaggctggctaggagacagctagtcctttagttgggggtggaggtggagtggtaagccagggtccccacctaccttgggaatgctgccagtgggaggagctggcctcccagctaaaggctgcttggcccctgctccacccactcccaccagcctgtttccaccagtaagcctggcccaagttggcccacccatctatgtctgggcctgcctgtagggcctctctgcacccaggcctccatgcccttgccagtccactcactggccctctcattcactcatgcacccagccaattgtttactgagcaactactatgtaccaggcaactgtgctgatcactgcttcctctcattgtaggtggcatggtttgcgggttggctagctggagggccaaaggacaggcggctaggaagagaattccctctgcaaatggaggaggtggtggccagcaaagtctctctaaagagatggaggggacactgtcaa

SEQ ID NO: 465 - DNA, 24675 bp, Homo sapiens
  source 1..24675: mol_type = genomic DNA
gttgaaggctacaagaactgagacaggagcatagcagagagaaacggtcaccatctcattagccctatttttggttgttgtgatgccattacatctgtatatctggccatatcagctgctaatggtgagttcttgcaaacaaaatgatttgataaacaacctaccatactttatacaaatcttatggtgttccgagaaataaactttggaagcaaaataagttaacagtctggacacgattgattctatattctgtttaccttgctctaggctattcaaatgttatatttatttgaacactatccaatatatgttccctggcatcttcctgtcttttaaatattctctgtacgctacagttctttgtaagtaaaaataagcttaatatgtctacttagcaaacaaagtttttccagatacctataataatgaggaaaacagtataaagaatgaagtatttgaagaataacttataatttgggggatttctgagaattctacttctttgtccctaatttccgaaggtaaatgtttgttgtgaatttggaaacactagactacagaaaagcaggcactctctagcctgggaggcccactgatcttaggagggtccatatagctgcttattgcagaccttgcactagaacccaggtcttttgacacctggtgccacttttcattccattccattaattatagcccagagaataaccaccaccacccccaagtcccattgtggttttattctgaggacagataaaaggttgaagctgatggagtggtagaaagaagtgggagccatagtgaatgaagacgtttaagggcagatattaacaccactgagtccttcattcgggattacaggttacactttacccctcaaactgtagaattcagtggaatccatggcctttacctctctatagatgacctttttcctacccctttacatctcctgtttttttcctctccaaactgccctaaatttagaggtttattttgaagtaataatcagtcacacacagcaaagtctctcccaacacatggggagcagatgtgctgggattatcactgccatttgaagggtgataaaactgaaggaaaggaatctgactaaagtggcacaggttagaactagcagagtcaggtctagaactcatttcatatttctagaattgtgtgatgatgtactgataaagttttacgatgcccggatctaagtattataatagtgtcaatttctaagttcattttccatcttttacctctcagtggcactcaactaatgttttttgcccccaaaggtcgggtactcacaaaagattccatattctctctggcagtaagggtgagaatgttgctggcagtggtaggagtggcaaggtggccagaggacagggtcctgccattcctcctcagcctccagtaaaccaagtgcaaaagccagagccaattccttctgccacccagcagctaattcactatagggaagacaagtgattgttcaaagggaggttttaaatcataaatcagacacattaattataactttaacaaatgttattaaaagcagcaattaaaaaccatgaatctttttgaaggtgcagagggttataaggtcagttggcagtaatgcagctattatctggtatgaatgaaatgctggggtggggagtcagggtgacctcattaggccttgtgctatcttcccaggtggtgcagacaccccctccctccttttccctctccaggcccacagcctccccagagcccaggtagggaaggtccagatgtactataacaggattgctcatcccaggctatctcagaagtctggaaagcaggcctagaaggttgctgggctctctgaagccaggcaggaagctacaaattggatcccagttcccacagcacccctgggctaggggttggcttctcagctccccttccacctggccctagttggcccctgtggcagcagctgtggggctgaaaagggggaagaactgggtccaacgccagctcgtctatgcctgggctgtgccagggaagcagaggaaagtgggtgggctgtgcacaggaggtgaggtcccccttaaaaggcactgtgggagctgaggtctaagatgggggggcatctaaactatctcagggaccccctgaacgctcacaggtagagaggggtcaggcctagcaatggaaaaacagctcctgcaggcctgctgccccgccagtgcctcttgctgtactaccaccttcgccttcctgctggcggcctgcaaaaccagccaagctggaggccacagcagcagttggcaaggctggtccccatctggtgcccaccctccacgtcaaggcacttttgtccattttccaatcaagtgagtcagtttctaatatctctggaagcagcaaaacatcaggggtcctcttccccctcccaattttggtttccctccagatgaggcagaatttgaatgttggttccaaaaattctctttcaaacccccactggcaagggcttccctttgagggaaccaaatgatgcaggctctttaaaaatttcaacctatcccaaaaagtgattgtccatttcagggcagggcaagggatatgaaagagggtgagtcccctgtgcttccctatgggaccaatgctggttgatgggctgaaagaaggagcggccactgagctttcacatttagttgcagcacctgggccctggaagtgggccaagggaaagccaagggaggagccagcaggcccagagggacggtgtggctctgtgtgtgtacacttgggcatgtggtggtgtggccgtgtggggttgtctgcatgcctagagctgaaagtacaacacatgtggatggaagcttgtgcgagtgggtgtgtattgtctgctgtgtggtgtctggtgggtctggggatgggaggcaccagaaacaggtttagcaagacatggtttccctcccaccactaccaccccccacccccgtcccccaggtttggaaggatgcctccattccagcaaggccaggcccagctctatggcgactgagggggtgaggccagagaacagaagacttctgggacctccaaagctgacattggcagccttcactctcagccttaatacctgggccctggtgctggtgccttctgaggcagacccagccctttactcttcagatcctcacaggctttcacaggggctctctcccatcccaccacctctctccgagggtagtggggagtggcaggaaagtggaagagaaaagcactgagcagcatcctcttatccaccttctcccatgctctctcaaaggtgcctgttatgtagtccctgggaggactggctgccccacgggtcacgtgtgaaggggatccagtggagggacagctgtgcacacacaggatgtgcgaacacacccagaaaggggcgagagaggtcaaggcacacaactggggacaaagacctgggcctcaggaggaagggtcccagcgcaggggacacaaggtcagagaacagataaacagagtttgagggggtgtggagtgtgtagagacacaggcacaggggtaacgagcctgaggaggccctggaacagagctggtacagcagagagacgcaggccttggcctggcaggcaggcaggcagggcattctgccaggcacttgcagctctgtcctgcttccttctcccaccccagcctggagaaagctggggagcctatggcttctgctgctcctcctttggttttcaggacccctggcacccccgggggctagtcagtaaggggtggtcccttcccactccaccaggtactgaaccttgccctcaggtgtgaccctccgagccaacacctggtacttctccccacaggccaaccgcccagctgcaccaaagtagttggtgatagatgacttgaggtgggacagggatgagtcatcttcactgatgctctcaaatgtgtggctgtcaatgccttcgtctggccgctcggggactgaagccccctctgcactgctgtccgaggggcagcgtccatccagctcagctgcccaccgctttgcccgcaggggcatgtatgccttggctgccagcttcctctttcggctgcccactgtccatctgtatcagaagtgggagaggaagatgatgagaatgaggtagaacaatcacagtaaattcctctccctgagtcctcccctcagtaccaggaaagtggaagagaaaagcgctgaacagcattctcttatccatcttctcccatgctctctcaaaggtgcctgttatgtagtccctgagataatctatgccttgggcatagattatctcaccagatcctcacaagagccctgcgaggagggaaactgagggtccagaggagaaaaccaggtagggagtggcagagccaggattcaaacgtaagaacgtccaactccaaagcatatgctcttagagctaggatcccggcactgcaaaagcacaagagcaccattctctgagcctcctgaggccatgcagtgcagaggccctgcttatcccaccttgcctctcaccagactggtggaacaagataggtcacatagggctgggggttagggactgaaggaccctgtaccctagagcctggatggagagactgacagacatcacacacacacacacacacacacacacacacacacacacacacacacgggtgttagagaaatggacacacagacacacaggacaaggcacagattcagatgcttagagacagaaaccaagacctgaagtgctggtgaaaccaaagaaacaggaagaaataggccaggcatggtggtgcacgcctgtagtcccagctactccggaggctgaggcatgagaatcacttgagcctggcaggcggaggttgcagtgagctgagatcatgccactgcactctaatttgggcaacagagtgagactgtctcaaaccaaccaacaaacaggaagaaagaaaaaacaggcaacagcagaggacacctagacagatgtcaagagacacagactccaagacagacctctacaggcattataccattgtcctttttttttttttttttttttgagatggagtcctactctgtcacccagctaattttttttgtatttttagtagaggcggggtttcaccatgttggccaggctgctcttgaactactgacctcaggtaatctgcccaccttggcctcccaaagtgctaggatgacaggcatgagccaccgtgcctggccaggcattatacttttaattctacttttgcaagggcctcaagtatcttaaaatacagtgcagcttgagtgcagaggaaagccctgtgctcgaccactccccgtactgctgaggaccagctgttgccagaccagttgtactggagataggcccccagggatttctgtccccactcctaaatcttccaccctgcaggatgccatcttctgtcaggcttctaaataaacggctctttcccttagagaccccggaagacaggcaccatattcagacagccaagaatcaaggtcagggaactctgtagtccaagaggcagagagacacccaagctcatggcacgtggaggccaaaagtgaaagaaactctggtccaacaaccccagaactggaatcgtccagtgagaggtgtgtacaagcttctgcagcaggtgaagcattccaaagggatggaaccacgggaggctgaatgcctatacttaggtcccatctaaagccccgtgactcagaaccagagggtccgagagccagactcacaattgcagaaggccaggtactccccgccagagactgagacacatagaatgagccacacattacagaagtgggaggtggaggggctgagaggaatgatggtccttgcaaaatgtgaaggccagacctctaggaagctcacctggagtcataggagaggctggtggaggcagagccagaggtgctggcagcgtcggtggagtcgacatctgagaagaaggtctggcctgagctggcactgagaggggcaagaccgtgagcctgctggtggcccggcccagcaagttcctgccaacctggcccgcaggttcccctaacatgcatccttcatcccagtggaggcccgtcttcccacagctgagcttcccaccaccacacctgtctgtttcctacccagccacccttcaaagtccaagaagtcaaaaaaacctcctggagcaccctcccctggcggtgacgtaagcactggtgtcaataactcgagcgtgatccaaggcacctgtgcaacacttcacaggtcaaaagtgctttcatttgcattatcttgtttgaggaaaagagctgaggaggttcagagaggttaagggatttaggtaaaactacatagctagtactgataagcagggtctggagttcaggtctgactctaaagccctcctctgtgtcctcaggaaaatactaaatgacctttaataatttggaaaataaaatgatggaagatgcagttcctcccttggacatacttaagcatggggtgctatggaactacaaaggagggcgtccagcacagcctggggagggttagtaaagccttcctggaagaagcagggtcctgagttttcagatgggctagggcaaggcaaagggtatctcaggcagagggagcaatacgagcaaagatgagcaagcatcaaacagcatggtgagtgtggataaccatggggcaaggtggggagggctggagaagaggggagggctgtggtgctctgggaacagggatgttatgctgaaagctctactgcaaaaagccccttcagacagacctgcacagcagggatccttttaactgagggcttggctttctgcttggttccctccctgtctccagagcagacctctgtgctaggtccctcactgatacctttttaaactttgaatttcatccagcgtgaagtcaaatatgctagccaggtggtggttggtgctccaggctgaggtgaagtcactctgtggacacaggaaggagagaggaagggtcagacagcgagtatcaaatccacctcccacacaggctgcctcctatccagccagggccgctgagggctgggccctccctagggtaagaccatcacctttattccaagtcctgaccagggagccaaagtcatcccagttctagccctgcctttgtctctagctgactgtacgaccttcacgtctctggacctcagttacttcaactgcaaaatggggacaataacccctgccttgcttcactcttacagatgtcaggaagtgcagtaaaattaaataatgcttctaaaccgcaaagtgctgggacatgaggcattgctaatactactgcccacagggagggcttcagggaggtggtggggttactgaaggaggaaagaaagtgctctggaaccctggttccaggctgggctctgccactttgatgtgtggcctcaggaaagtcactgccccacccttccctcagtgtccctacctggacagtggggacaagaatattacctgcctttgccccccaactttggattcctgggagaacttggggggagataaagcaggggtcttagagtgcctggcttagctgtaatagggactggcttctttaagggacatgagagagtcctctgggcctgggggacttagttttcggcacaggaagccctaatatgtgctgaccctgcgtatgaaaatggagagtaagaaaacaaggaactaacactgggaatagcatcttccagcaaaaactttgatctttttcttctataaactcgccttttctgctgctggaattcgtgaggcaacaaactgtggagacagaagagggagaaggtggccccgtcagagcctgagggccctagggtggcccagagggaggcgccgcaggggcgggggtcacagcagttggggagacaggctctgaacacagctgcaccttcacagggaggcctggggaggagggagagtcctcaggagcagtaggggtgggaaggtgtggagaaggtatagtgggcagaaaaagaaaaggtgcctccccaggcacatgcatccagatgccctgccccccagtgccaggatgagggggctcagctgagccaggagagagagggacccctcacacaccctgccttccccttcacctccttgcccaagtcctaatccagcaaggctgggtcctcagatctggcttttcctccttgcgaggtaataagggggctgtggtggtgaaaggagttggggatctgggatctgggatcccgctcagccactatctagccctctcagggtcctacagctgggactggctgggtgcaggtcctccttgcttgcttggaagcagagaaaccgagtttggcggcagccctggcccctgggtccccgagcactgacccaggcttgctctttcctctcttacgcagctcagaggaggcgctgttctcatttggcagcagtcctttgtcaggcagcagcttccctggcgggttgggtgggacgcggatgcgcaggcggaagatgcacttcttcttcttgatctccttgccgcagaggaacctgggggtgggcagtgggaggaagaagctctggagtctgtcagtccatcctcctggggagtggggtcaagcatgacacaagcctctctgcctccttggacccagagctaaaatccggatggtctctgcagatgctgacttcctcaaagcccatgggatgcggggttccaggtagcagctgagaacacggctggtgcctcctccctgtgcttcctcctgcatgagtgtggttcttgctgctcttctcccttttgtttgcctcaaccagccccaaggccacctcctgcaggaagccctcctccagcttacagtggaactcctatggtcaagatactggaatctacttcattctgttctctggtttccccaggagactgaaagcaacaccggctgggctcctctgaggctgcagaagtgacttagacacagccctaccctctttagtacaagaggccacctgccctcccaatagaggactgtccattgggagggcaggtggcctcttgtactgaagagcagagctttgtctgggccctaaaccatgagaatgtggaagagagagtggataattctacccagaggtgtctggaagagtttcagcgatgaggaccttattttattccccaccatgacctcagcacccagacaggcccgacatagaacagcaactcaatgaatacttgttgatggaacgaatgagtaaaaaagactgaggcacatcctagacaaagggcagagcatgagtaaaagtgccaggtaggaaaccaaggactcaggatggctggcacccagaatacagaaagcaaagggacagcggcagaggacgcgggcacagcctggtcttaaaaggccttgagtgccaggttcaggaggctgggcatgcctctgtggtgtagtgagggacatggccagctgtgtgtgctgagaaccctggatgggaagacaggggctgagggatgtcttccacccgaggatgtagcccacccgagatgatgcacccatccctcagtgcctggcccccaaggcctagatgtctagagccggaggggccctcagagagcaggggtgcagcccccctacagagctgagcccagtaccaaaatacggcaggctgctggggtggttggagtggctgtgcaaaggaggtggggtaccccctggatctcggagaatggaaatgattcagagagaaggggagtatcagagaggcagggagcatagcctgagcaaaggctatgaggtaggaaggaatctcacctgtagagggccccaccacactccctcccctccctgcacgcaccggcttttataactgttcagagcgttgaggagatgtggtcctcgatctgtcactggggtgctggtgagctgtgggagagcaggccagcaggacatcagacccaggcatatggcgcatggggaggcccaagcccctactccctcccttccatctcctgatgcttctgagtccttcaggtgaggaccactgactcactccaggatctcagaaaagccttttcacctctccaagttcattcccatttgtaaatggagagaatacttcctgacctaactgtattgagagctttaaaaagtccatacccttgacccagtaatgctactccatggaatctatcatggaatctatatatctgcagatataacacgaaataggaacaaaactttacatacaaaaaaaaatggtggcattgtttctaatggtggacaaatgggaaagaaactgcccaacaggaaggaaacaagtaaactatggtagaaaccaatgcagccatgaaatttggcgggcgcctataatcccagctacttgggaggcggaggcaggagaatcacttgaacccagtgggaggaggttgcagtgagctgagaccgcgccactgcactccagcctgggcgacagagggagactccgtctcaaacaaacaaacaaacaaaaaattttatgaagattctaataatatggaaaagtataatgtatactaaaaaaaagattatttaaaattgtatatactgtatcatttaaacgataaaacagaaaaagatatacatagaagagagtcggaaaggaaatgtacccatgcattagttctagtgatttctgggtggcgtgatatggattttttaaaaagtatacttccttatactttttggtactttaaagattttccaccacgaatatgtacaattaaaaaaaattagaaaaaagttactaaaaaccaactctacgtatcttttaaggttttataatatctatttttttaaaaaaattatcaaatactgtaaatgaagatgttattacatgaaatattttgcaaagcataaaggttattctttttaaattccttttcatcaaagaaagatttggggcagtccatagagaagatgcctcactctgtatgtggtggagaggattctaaggatgtcattagggaaaagaagacacagcacccccgtgggagtgattagggaggccctggctccagctctggctcagcctcaaagctctgctgaccacgggcaagtcactctgcaactctgacattccgaaagtctccgtttgtaatttcactccgtggatctgaggcttccaaggcccttggtgacccactatttagcataggatcagcagtgggcagacccactccatgttgcaacctagccaggaaatctggagtgggtcaaacactcagcagagagctgtgttccagccagacttgatctagggcctcagctcccctccactgaactggggaggccccaacctgcccactgccaaaatctgggattaggaaggcccttaaaggacacaagatcagaggcctggactcagggatgcagcaactcaagggtgagagttcagagacttccatcctagtcctgcactgcgtggccctgggcaaacctctctgcctcctgccactgacatcccacaaccccacataccttgccaagctgcaggagctcccagtggtggttgacaaaggccagaatctcctcaaagtcaaagtacttcttcttgctctgtacccccagattatagagggccaggtgaaccacatccaccctgggcaagggggcaaggaggtgggaccaggtgaggtggcagcctgctcagccagggtcacagctttctgggtccaggctgagagacaggggcagggttgggacccagtagctggaaatggaattgttccaggagggaggagggaggggagaagctgggaggagcagcggtggttggactaagccccaccctctcaccatcgcaggggcagcctctcgatgtactctgggccctggttacacacggagcagaagaacaggtaaaacctgtgggtgggtagagacgggggcctatggtgggaggggctctgacacccccaccccagtccagccccttgatctcctcattccccacctaccttcccataatcttctcactcctaggactgctggccactgggggtcaaggacagggcaggacagggactaagagataccccatattccttctaacccatgccctcaatctccttcccaaatcttgccctgaagcgtggctgagttcacagagagtgagctgagctaggctgggctgccatggtcaccctcttcccctctgagacagccacacacgcaatcacaaatgacatgagacaccaaccaaaagatgcataacatcaggtttgacatccataaggactccattagctttgctccgtcggttagaagccacattaagccatccatttccccagtgactcccacagcaaccctgggcagggctggcgcaaggactgtgtcatcccttcttccccagacacttaagagactagggcatagggaaggcaggcatttatctaaggtactccagaaatcaatggcaactagggatgtggcccagcatacttctttattgcctcctggccctgcatagctaggggatcccctaccttgagctgcctccagtaaacaggtaggcatacattgtcacagacctcctcttgtctggagcctggcagtcaacctgcaggagttgttgctgccatccctgccctctccccaccacgcccaaggcccacttggaccaaattagcacctaccggtctccaaacatcatgggctcattgaggcactgggtgcaggcctcgtggaaccactgcctgcaccggtaacattgcagcatccgcaggtaccatctggagagacagaggagccaaggtcagccaggaccacacccccagtcaggtatgagcttcggcaacctttcccaagttaaatttgccctccactggcagaaagggaagagaattcagttactgagcacttaggctgtgccaagggaggacctgagagttggacatatactctcatttcacctcaccacctggtaaaagatgggacactgtccccatattacagataagtcacaggtgaaatggcttgccctagctcacaggcaagtggaggatggtgattcaaattctggtttccctaacttcagaggctgtgctctccttgccatgccacaatgaagccaccatttctggacttgctgcttcccaaacactgctgacagggaaacgtttgccttggagacttcacgggagaataatggtttctgtaagctgcacgggggcaagactacatctggcttttctcacctgcaactgtatctggcctatcatggtcatccaacaactattcatggaatatgaagagcaaaatgctcaatgcttcattgacaccttgtcaggtgagctccaggttaaaacgcagattccttggtccactgcagacctattcaatctttggggaagcctctgggatgcatttttaacaagcatcctgtgcaactctgcccataggcgttgagaaacactgcattaatgcaggaaaggtttccataagcatttctccatctgacaatacttggggaagctcatgggcctgaagttaaggttaagcccatttgagagatgaagtagttcaagctttgcccaagttacccagctggagcttggggctgagattcaggacttcagggggtcctgacggctgaacttcctgagggcagagaccctccctcttacatctgtggttccttccacaatgccacgtgcactcagcccaaagaagcaagctcaactgccatggctacatagaggcccaggtcggcaaggaagaatcaaagactcttgccgcagagccaggacaagaattccctccacagtggccccgacatagcatgccccgccccccggccccctacccctgcctgattgcacatctccagggaaaagaatcttttctatttttggagacagggtcgtcctgctttgtcgcccaggctggagtacagtggcatgatcacagctcactgcagcctccatctcccaagctcaagtgatcctcccacctcagcctcctacgaagctgggactacaggcgtgtgccaccgcgccaggcgggaaaaggatcttcatatctcaccagcagccggttccactgactctgactgtgaaaaggttatcttgactttcatgcattagtaccaccactaccaccagtaacagctcacattttttttgtttaccaaatgccaggcactatgagaacctctatgtgaattacgtaattcatgctctgctcataatcaccacatgatggggaaactattcagagagctgaggctaaggggttgcacagctggtaaggagcagagctaggacgtggacgtcctgggaggattcgcactgtgtccggcccaggctcttaaccactcttcaatacttcctcgtttcctacaaagctccaaggtaacacctctgccctccagccctgctccacagtgctagatgccacgcggagccggccttctgttctccccttgaggtcccgccccctcgggccccaccccgagcccttcccttcagggaccgccccttgaggcctcgcctcctcaggtcctgttcccgaggccttactattccctcctccccaccccgcccctccacagggtgcttctcgacctgcctcacctccctggggccctgcttgggcggtcgcaacccgccaggcccgcctcccgaggcctcgccccaaggtctaaccttccgggcccgccccccgaggccccgccctcaggtccaatcttccgggcccacccctcgaggccccacctccgcagcggctgacccccccctccccgagtcccgcccccgaggccccacccccgcggctgacactccaggcccgcccctcgaggccccgcccccacagcgcaacacactgggcccgccctcaaggtccccgccttggctgacacgccaggctcgctccctatgggcggtccctgctggcgattcttggagacctgccctgccgcccggggggccctgaccccctgccttactctccgggcccgccgcagtagcagtagcattgctgctggttggtgcgatggggcgagtcccactcgagctcctcgggctggtaggacagcaccatcttcacggcctgcagcgtcctggcgatggcgcccttcttcagcgcgccgcctttctggggggagacgagggccccagtcaaccaccaggtccgggtggaccacgcgagtcagcacgcggctgtctattgagggaagtgctgccagggcttgggggacccgcagatattccaatatagtcagaaaagcaaggagctttttctcattaattccaaacccatcccctctatcccagaaggaactccgttgataacagaattaagagtaataagcgcaataaaggcaacaattaccaacatgtatttacatggattttcttttttaatagtaaagcatcatttattggtcccgttattcccgacaccaaacccatctccactttacagttgaggaaactgaggctcagggagtctacaaatcctggccaaggacagtggcagaggcgctatctgtctccaaagcccaggtgtggcccttctgcttggagctcagactctgtgatgggagtctctggtctgccccactggaggaggcaggagaggcagggactggggaggatggaaggctcacccgcacagccagtgcgaagatgcagcgtcggcagaaccaaggtgtgagcaggggctggtcagcactgcccgctatggggatgtggcactgctggtggtaacctacggcagaggagggggcggtgagcgcccacaaggacatcgtggcccaaggccagttggcccaaaggaggcagggctgggagggctgagggaagtcctaggagctctgcctgccagctgccgggagcctggctgctggtgcccaccaagatggccaagtcagtgtccaggctgggaactaaatgacagcattggccagttgtggggttgggggggacacaggaaggtctgacttcagtgcctgagccccatctttcccacccatcctctccatctagctgggccccaaattacatacaccatcataccctcccagctttccccaggatctcttcccaagccctcacttacagcaactggccccctttcaccctgcagtgccaagagaaacaggaagccagctgaggccccaacaggctgcagcagtacccgtcaggggccagtgcgtggggacctataggtcggggccttctcagggccctgctcgctccactcacccaggccacacttcccgcagatgaggatctcattcagcggccctgatgtcttccctaggcagatgttgcacttgggctcctctcctggaacaccggctgaaagagagggcctcgagggtcgggtccagctcacaggaatggaagttttatactcacattccagatgcccagcctctaatgtctgctaggcctagcgctgggccccacatgccacctcactgaatctccccaaccactctgagatgcctatcatcattaccattcgaaagatggggaaattgaggctctgaaaggttaagtcccttgcttagctagtaagtaggtgagggggggattaaacccatggctgtttgacatcaaaccctttgttcttttgacacatcatgctgcctctcccgccttatttaacttgttttgttaaatggttgttattttcttaaaactttattatgggataatataatttgtttgtttgttttgttgagatggagtctctgtcacccaggctggagtgcagtggtgtgatcttgtctcactgcaacctccgcctccctggttcaagcaattctcctgcctcagcctcccgagtagctgagattgcaggtgcatgccaccacacccagctactttttacatttttagtagagacaggcttttgccatgttggccaggatggtctcgaactcctgacctcaagtgatccacctgccttggcctctcaaagttctgggattacacgcgtgagccactgtgcccagcctagaagttataatgaaactccatcttctcatcacttatgaactcatggccaatctcgtttctactatattcccacctacttctccttcctgtaattattttaaattgagtcccagatacccaatagtttttccataaatatttcagtatgtatttgtgaaagatcaagactctttttaaaaaacataattaaaacacctctactgcacctataagttaacataattgcttaatatcattaacaaattcagttaatgttctcatttccaattgtttcttaagtacaaataccttaacaattttaagtctgttcttttgaatcaaagtccccaagtaaagtccatacatggtgactggctgatgtttttaaaattgcttttagtctacaggtcccctctccatctctttttttctttgcattttattttggttgaagaataaatatgtttttatgtgtgaaaggtttgtatgtatacattaaacacattttgatacgtgtttgtcttatttccccagcatgctgaaaattttgtaagggtagaaatgggatctcttcggccgggcgcagtggctcacgcctgtaatcccagcactttgggaggccgaggcgggcggatcacaaggtcacgagttcgagaccagcctgcccaatagggtgacaccccctctctactaaaaatacaaaaattagctaggcgtggtggcacgtggctgtagtcccagctactcaggaggctgaggcagaagaatcacttgaacctgggaggcagaggttgctgtgagccgagatcaagccactgcactccagcctgggtgacagagcaagactctgtctcaaaaaaaaaaaaaaaaaaaaaaaaaaaaaaagaaatggtacctcttcatctctgtatccccaggacctcatagagtgtggcatgtaacaggtgttccaagacgtttgttgaatatatggccaggcaggaacgttgcctcctattcttgaacatgctcccaggaaggtggtgcccacagtgcatctcagtaagtcctcactgggttaatgaagcaatggatcaataactacagtggtgctcagccttatgctctcatctcaggagatgctagagggtcaccattctgcccggaaggggcagttctggctaggagacaagccactcttcagctgatcactgtgggtacctccaaggagcctggtatgtggtgggcctccacaggaggtcagctaaggtgcatggtcttctccatctggctccttatgctttcaataagggggtaaaccaggagaggagatcctcattgctttggatatttatataatactatttcaggggttggagaggaatcggtctgcactggccacaatttcttggagaagggggcaattcgaaagctttactaactggctgagttctgcagcctcttcttggcaggcttcttggaatcatctcttattgtaacaaattctttttttttctttttcttttcttttttttttttttgagacagagtctcgctctgttgcccaggctggagtgcagtggtgtgatctcagctcactgcaacctcctgcctcagcctcccgggtagctgtatttttagtagagacagggttttactgtgttggtcaggccagtctcaaactcctgacgtcaggcgattcacccaccttggcctcccaaagtgctgggattacaggtatgagccactgcgcctggctggtaacaaattcttgagtaacagcttctctaaaaccaatagtactgagctaagcattttacatggattagcttacctaagcctcccaaccaccctatgaagccagtactttcactatcacctctcacatgaagaaactaaaactcaggtcatattacttgctcctgcaaatgcagctagtaagtggcaaagctggaacttggtccaaggtctacctgaccctaaaatctgcttcttaccctgctaggggccatgtctcttctcctgttagagtataaatggcaaacaggtttctcctcttatgccaactctgattgacaggcagtagctgcttggggctccaagttgaaagtacatgtgttgtcaatggctactgatgtctgttgtgtgtatgggaagggagaatggtggcaaagatggccctgacttgccatctctgcaagggagagatgtcagctttctgaaggcagggatgatacccaacccagattcatttcagccctaaaagctggtctagctccatccaggcatgtccatcttcaccctgcctggctcacctctgctttattggtttttctcccattcctcccaactccttgccccgtggagaaggctgcttccattagttttattcatatgttaaatcagggacactgtgcttgcatctagagctgacaattctgaatacctgggcacgcccccttttctagcccagactgacgcagagctttgagcagctgcagctgtagtgcagccaggaagcaaacgcaggcctgaggcccagtcctggccctcccagcacctccctaagctaccttccccacctgcccatcctccctcctggggtatgaattctcaaggggatgactcatgtcctaagtaccttcctaagtcaatatacaaccagatttgatcatcatcacaggtgggcttggggttcatggtcaagggcagatgccaggagtaagagatggaaggacagaaggaagaaatgaaggcagcagaggagagaagacctggggaggttgggggctacccgaaatgttaggaaaactcaccatgctgtatgtccttccataggacccagtatttggaattatcttcgaaagtcacgaggcagctttgcttagagctgctgacctggggtacagataggaaggagcaagtgagaaagggctggggaaaagccaacctggaacatagtcttcctcccccatttttgtctccgtatgttccagaaagcagggctagaaggggaagaaggatggcagttcctggacagggtgtactcctagtcacctggagtcgtacagccagggaccgatggatggcaacttggtcagaatgttgaggacagaagcacaagtcagatgctcctctgtgatcctctcaaacctgacttttttgttttgtaggctctcagagcacttttctaaagaactagttggatgatgttgaccctagggatggtgcctgcaagaccaggctctggcccctcccaccaccagctttgggcatgagggacaagaagggaattctccagcaatccccctgccccctggtctgacagccaggctggaacatgagcagagagattctgagtctgagaacaggggccagagaggatgggtttaccctcttgatcttcccgaggtagtacaggccatctgtccaccggcacagcacatactggccctccgtcagtttggacatcaagtctttgaagttgttcttgaccttcgccagggcccccttgttggggaggtggctggtggcaccataggagtcccgagtccctggatccagagctcgattctccatcagcttcccctgacactgggagagaaagaacagggtttttgcttcttgcttccctgcttcagaaagcccatcaggggaaggaaggaaaccaccatttctgtaccctgtgctataagccagacttggttattatctcactgattcctcgtgaccatcctatgagggagacattattattattcacatcttacagatagggaaacaggtgtggcaaggagaagaggctgatgggccaaaggcagagccatggcccataccacactaccttttaaagagaatggatctctcaacccacacagaacaaagtcccctacccagcgggcctgaaccactccctgtctcaggaggctgaggttttattccttaagcaaacacagtccatgtgctctggatggaggatcttctccaggcaagcagttgggttttgtttttacccccaacccctgcaaccatccctaacctgagatctgtccagagaaaattcacctagaaaggaaaactgggtggcttgtagctagtgtagactgggtcatctgtcttttgtaatccccccttctgttctcaattatgagatgatttaatggaaaccaattctgggacatttaaacccacttatgctttcacccagatacacatttgctccaagcagtgaagtcatccatccccatgccagcctctccacgcctgtctctcaccatcctattcaacgtgcagttcacccatcgatttctctctccctgcctgtggtactgccttcatgcatctcaaactcctccaagcaattagttgccacagccggcccattttaagtgccatgatttctggctttccagctctagcttccatcctcctgccctggtctcagttcaggcctcatcttttgcttgggccattcattcattcattcattcacccaataacagtttcctgggccttgtgcttacctccactaggcacctagggtggggaacggtactaccagcacccagtgctaaacaggccgttcctgcattcctgcctctccaccagactcttccgcagggccaccaatttccttccagaaactttctggggctccccactgccctcactggtgctcaaagccgtccctaacgccccctcctttctgctgggctcacctggctccaagtccctccacatgctctccactacagccacacacagcctctctctttccccgcgggcctactcgggtctcctccttgtggccatggcgctgggcacctggtgttgtgactatctgttcacagggagagagtccagtgcctgtttctgtgtggtgcgtgtgtgtactcctgtgagactgggcaggatgatgtctacggcattgtgccagggagtgtgtgaagctaagtatgtgcggggccctggggcgagccaggcactgcaggggtctcggctccccagatggtggcgtggccacgaccttctccacccccactcccatctcctttttctccagcgcagagcgcacaggctcccgggcaggggatgcggtctgaatccctgtcctctccctgccacctggctcgcccggcgctgcgaggtccccgcccgcccggccaggggccaggccggggccgctgcaggttcacaaactgacacttcctctcccgctgcgcctctaggagccggccgggtcgccgcacccgcctccaccctggccgggcgggggcccccgggtggcgcccccccagcccccgcctccgtcctcccggagcgggcccccgcgggctgtgattggctgattcaaacccatttgcaaagaaatgcctgtttgcgggttcccgtctgcgtccagttcaaatccgcggcaccgggagcgcggggccgggcgggggcaggaagcgaggatgattcatgcgccggggcctctcccagggcggccgttggctttttaaaaaggatgttcaggaggggggaaaaagcttgcagaagcacccccttcgggttcagcgctcctctcctcagtcgctcggacgccaagcctcccccatcccaaccctgccgcagcctgacttcggacgtgagcgaaatgccaaacgcccgtctgtccttcccccaccccgataggaaaattaaagatcgggggcgaggaagaacgacctgtcacccatgccccccggggctcgggaacccgggtggggcccctctgccccgcaggtaacctgcacccccggtccccacccccgagagccccgctccgcaggagtctcaccccccggaggcgttcgggccgccaaagttcagggagatttcgaaaagagagggatgagggccgggaggggagagcgtggcggggagtccgcccaacagcgcagaactcaccgcgaggctgcgtgtccgccggtcccacttggagtctggccaccaggcgcatcggtggcggaggcggctgcgctcggcccgcggctgcccggccgagtgtccgcccgtggggccggggtcggggtctcggcgggggcggggcggggcgggggcgccgcggggaggagggggaggcggcggagggaggggccggggcgctcaggaaggggccccccgggcgcggggcgccatctttttcgcgttttcccgcgaattattgacgtcccgcttatgtaattagcgggggccgcgccggcctcgccattggagcccgcggccgccgggctccgcagcgccgccagcccccgcccgcccccgcccgccccgcgggcgcgcatcctccgcggccactagccaggacccgggccccccgccgaggagcggccacaccgcggcgcacacggagacgccaggcagcgctcatggcgcacacgaccgctcgcacacttgttgaggaaacacagctctgcgcgcaggcaccggcggaccctggcacagacacacagcagggcggcgcggacccttggcgcagacacagacccaggacgcccaaacaggccacacaacaccttgcactaacagcacaggcgttcggcacagagacacagcacaagtataatgtagatacacaacacacagtgcacaacgcatgttgttccgacacaggtcagaacacaccacagcatgtacaggacacaaacacaccacaaagagaagtactgtacacaccagccataggcatagatacacaagggggaacacactgtacacaacagagacacacaacagaacatgcatgtaaggtagacggacataacacataaagtcacaacacagacgggcaagagacacaagttttcctgaaaaagtggcattcagataggttgtggaaataggttagtgggtgtgccaggtggagggaattcagtgggctaacaatgcaatttttaaaatacgggttaaggatatcaaaaggcaattcacaaaagaggaaacctacatggccgaaatagccccaaacaacaaattgcgtagagacacagtgcacagaaatacatggtacaatcgcaaatatataccacacgcacaacatgtcatgtaaataaagggcacacaatgaaagacaacatgcacagagtcataggaatggcagatggagtcagtgggcagagctccaatcatagggaccctgccctgtgggggaaaggcagacatggccccacccagactcactcttgggggaagggaggaagaacacttaccaataaccccacccccatccttgccctcagtccacagcgcccacctctgtggctaccatcccactctgcagacacccccaccagacagggatatgtgctttcatgggtgtggccagtggacagcaccttcccccagagccttccctgttcactgtcagttgctcactctgggccctctgcctcctggccttggagcatgatctgtgcagccccccacctcaccttctcagcagagatccaggagtcctttcacctccttcctcacttccttctgccccttgatccccctgctctcacctgcctcactgccccattctggatcctggcgcctcagcagaacctagcactgctgagtacctgcctgaacctggaaggaaagcctgggagcagccccatggcacaaaatctcccaatcctggagagcacattttcaagtc

SEQ ID NO: 466 - DNA, 322982 bp, Homo sapiens
  source 1..322982: mol_type = genomic DNA
gacggatgatggaggaagcatatatgtgacaatttacagttcgggaaattcagagaagtagctcctcaacagtgtcacccgtcagtagaatacttccttccagaatcagtgtcaggaaatgtccaggaagccaggaactgagcctacacatcccgatgtcccaagtgcatgcgcatgtgtggctagccaatcccttgccttcctgcctctgggaagattattaggtcttccatttgttttcaagtaagaagcaaaaaaaaaaaaaaaaaaaggaaaaacagcttgagtttctttccatatcacagccttccaatgtgttattattcaacactgcagtgtcagatttagattttccacctcgaggaatttggtttagctttaattagttgctgtgaatatttctgagccaactctggaaagcatttatctggaaaatagtttccactaaaatataagctggatatagggtatcattttcctaggagggtttgtatcagttaacagttataaattctctccagccctctggatgacttttgccacaagcccatcatcgtcatattggttaattacttattaattaaacacaattcaaaatactgtattgaggcatctgcatcgccatctaagctctagcttcaggacttcagagcgtgaagatttttcggagaaaagataacgcttacaggttattctcatacaggcaactgatgcatttttcatccggcaacttttcataaaaacaagctgaaaaataccagacaaatgaaaaacagacttcagcagttccatgctgcttcctgagtaactgaagaatgtgcttcttgtggttaaaatgagagatctgtttaatatggatcaaatagcaacactccaggcattttcattgacatttcactgtgactttttgaacttaggagtgcggatacgaaaacctactctttctttctgctgcgcggagcctgcacaatctgcagaaagattgcagagccgggccaggcgaggtaacaggctacgtggggttcatgttctctctggttgttccctccccgtttgtacttcatttccattcacacggctgcacttcccagttttccaggatctctcctctgaaaccaggcaagggtttgttcccaaatcccacccattgcctctccagccccagacttgcttactggaccacacataggtggtgggcattggtgacttgtccctagggtcaggggaccagaaacttcccagaggggctggatggagcacggcagcactcagggcacaatggagagcggattcaaagggcaaaggagccgaggaaagcccctctgcccgagcctccccagcgccggccgggctccgctccggagcagccccgccgtctggcagagacatgctgttttgtttaaatcctccacattctttgccatttccccattggccggatggggctaccctccccgccgcggccgctgctgatgtcagcctcgctcgcgctcgctcctcccgcacccacctcccggccccaggcacactgcatcggcgcggacgctccggccccggcgaggtggctgcaaactcgcgggcacgcacggcgcccggggagccgagggactcgggggaggggacgcgcgcggaaggcgccagcttcctcccgcccgcccctggcagccgcgagccgaggttggaggcgcccggggccccagccgggcagagccgagcggcggcggcggcggcggcttcccttttctccccgagccgagccccggagcggcgcggggaccggccctaaaaagagcaggaaatcttgtttaccgcccgcggagagaagccgatcgagcctttgtctggaaagtcagcatctccggctccggctgcaatgtgttcctggtgacattagcatcgggcagacccgccggaggaggggggtcgccaggttcccgtctgctttcggaggcggatcgagcgggtgacttttgtgcattcgttttaatttttggaaatctctcttttttcctccctcgctcgctgccgggcatgtcctgatctggcggccgctcctaccaccctgggcagccgagcagagtcgtccccagcgggtctccctccctgcctccctgactttgcaacaccgcgttccgggaggaccggcctcggcgagggaggaggcgggggagctgcgaacacccagacccaaaccctgacatgctctggggcggagaggaggaagccaggagctgagcgcgccgcgggggctgcttcgccctccggctccgagcgccgggctccgggcgccctgccctgcgcctgggcagcagccttgctggtcttgggggcgccccccgcttcccgccccgggggtccgcggccggcaggaccatgctgctgaaagagtaccggatctgcatgccgctcaccgtagacgaggtaagcgccgcgcccggcccggcctcgcccgctccgggacccccgccgctaccgccgcctcctggccggcgagccccgggcgagcggcaggaaacccaggtggacgttaccccgcaaacccgaagcctggaggagaggagggaggggatttgcggcttccacttgtcaccccagcgggggagggcggcgctgggtggggcggcggactccgggtgggcttttcgggggcgcccagaatccagactgttggggatcactatgagccaaagggagtgggtgcgccccctccctccaaataagaaaatgaataaaccaaacccaagagcccccggcgcgcgctgtagctggggtttggggggcatcccgtcctggccgtgggcccagcctcccctccccgccctctgcggtcaggtaggggtgcgaggaggagccctgcgccctcgggatctgcacgccccgagccccgcgggaggaacctctgagcccttaggggaggtccctgcggggcccgacttctcgccgtcgccgcgggcttgggcgcagctcccggcacgtccgcccttcgaggctcgggacccggctgtgtcctttcgcaaaccgcctggctcggaaactttctgcgtctcttgtttcttccgccgcggggagcggcgcgcgagccgggagcggcgggggctgcgacgcggccacaggagggcgctccagcacgtggtgccggggccgcggctgccggctgggggcgccgggcgcggggcgggggctcgtcctccaagcgcggctctgctgtccttctcccgatcctgcgaagccgcgagctccagtattcaggaagtggtgactcagataggattattccggccccggcttccctttcttccccttcttcctccccacctttgtggtgattccacgactgctgagcgtctctgtccagggacagcgagggagcccaaagccaagcaaggcaacgtgaaactcactagtgtggtttggtgtggcaacacacatgaaatcagccacccagaccgtctttatatttaaatctggtgcctcgaaactatcagatatgtttttgagccactacttggtgagaggggcgatgtgctttgggagagaaaaagatgcataactgagaacatggctgagctcacaggggctgtccgtatttgccatctggaccaagggttaaggtaagacccaagtacaatccaagacaagatcaaagtagctgcaagtttacaaaacgcatcacggggacacaggctgccaaggagggagagatcagcttccaccagaatgaacaaccgagttttggagttcgttggcatttgaggaggtagcatttaagcagggtctggaagggtggatgccaggtgggtagacagagattcgagttgcatatgaccttgtaagtggagaagcaggacatagctttgtggagaaagagaagggcaaatgaatgggactggttaataggagtctttccagaaaaggtggagattgtcccaccttgtgggcagttgagctagagtaattcagctgggaggcatggatccctctactccatatcctaatgaccttgttttttgatatgagtttggattctaggagcaatgttgggactgcatgaaatacacagaaaattgcaggtgataatcaagaaaagaaccagttctagaatcttctctactaactacaaaatctctttatcctagttggttcccttttcaggctttctgaaacactcaggcagatgcttttcccacttttgtttttgtaccgaaatacccacaggtataccgtggggtaattacatttgaatgatataggtggaggcccttccttccttccttccttttttttgtcttttcttttcttttttttttttttgagatggagccttgttatgttgcccagggtggggcgcaatggcgagatctcggctcactgcaacctccgccacctggattcaagcaattctcctgcctcagcctcctgagtagctgagattacaggtgcctgccaccacgtctggctaatttttgtatttttagtagagacggggtttcaccatgttggccaggctggtcttgaatgcctgacctcaggcaatccgcctgcctcagcctcccaaagtgctgggattacaggcatgagccactgcgcccagccagcccttcctttcttaattggccaacaaaatcagactcatcagactccacctgtaatataattataaattctttaatgtataattcattttggccaaagtatgattcagtttctgtaaggttcatattctgaagtcattttcggctttgtcagagaagcaggagggcaatttagattaatagatgtttccaattagtaggattcagattagctaaatctgatgatggatgaagaaatgaggcctagtttgccagatgttaaacccctagagtcagaactgatagtaaattccacagtctccaccatccccttttccactgaccctttttccacattgaaaatgaggaagcaacttgagtttctttaaataagatgtttaggtaaactttggaagcctaactttttttttttctttttgagacacggtctcgctctgtcatccaggctggagtgcagtggcgtgatcctagttcactgcagcctccatctcctgggctcaagtgatcctcccatctcagcctcctgagtagctgggacaataggtgtgtgctgccaacccggctaatttttttactttttgtagagacagggactcgctgtgttgcccaggctggtcttgaactcctgagcttgagtgatcctcctgcctcagccttttaaagtgctgggattgccgggtgcggtggctcacgcctgtaatcccagcacttggggaggctgaggtgggcagatcacgaggtcaggagatcgagaccatcctggctaacacagtgaaaccccgtctctactaaaaatacaaaaaaattaagcaggcctggtggcgggcgcctgtagtcctagctacttgggacgctgaggcagtagaatggcgtgaacctgggaggcggagcttgcagtgagctgagatcacgccactgcactccagcctgggcgacagaacaagactccactcaaaaaaaaaaaaaaaaaaaagggctgggattacaggcatgagccactgcgcccggcctgggagcctaacttttgcttccactcttggttggctctgggcctgattcaacctacatggaacttctggaacttgtttctctctcttttttttttttttttgagacggaatctccctctgtctcccaggctggagcgcagtggtgcaatctcagctcactgcaaggtccacctcccgggttcacgcgagtctcctgcctcagcctcccgagtagctgggactacaggcgccagccaccgcaccctgctaattttttgtatttttagtagagacggggtttcaccgtgttagccaggatggtctcaatctcctgacctcgcgatccgcccgccttggcctcccaaaggcgtgagccaccgcgcccggcctacttgtttctctttaatcaccagagttcattggtagcagtgtccatacttttgaaaatgaagcaaatgctcatgctttgaagaatcagtgagagaacccacactttgcctgcttcttgtgcctggccttatcccttctccctcatttaacactctggtggtggcgggcggtggagcattagtggcactggtgtgttattatctatattttgcagatgaatacattgagattcagaagggttaggtaatgtgctccaggccacacaactagttaatagccaagccagaaggagagcatggtgaaacccattatttgtttttccttactctgctttttgcctgtcactagtgtttaatccagcaaaaggaaaaacatttcttgaaaacagataaagtcagcactatcaagtaaatgaaaaatcagaggccttttgacttgctatagacggtactggcctctactatttctctagctttattttaacacataaaatgttctctagttccaggaaaaaagaacagctctgggcgatcaagaaaataaagctgaactactgtctagattagagtgttggtggggttttttggtgtgtgtgtgtgtgtgtgtgtgtgtgtgtgtgttttagacattaatttcagagtaaagaattaataaaagtaacattccatagattaattttaattaaaacatttcattggaatagtccctcgtttgtgttaaatgtggtggtctctgaactcaatataagcctgttggaaaggtatgaacaggaaaagttcctgagagctgagagttgctatagagagaaagttgtcattatcttcatttgaaacatttggtagacgtagatgtagattctagagtttttgtttgtttgtttctttttctgagccacactctctcgctctgtcgcccaggctggagtgcagtgggatgatttcggctcactgcgacctccaccgcccggtttcaagcaagtctcctgcctcagcctcccgagtagctgggattacaggcgcccaccatcacgccaggctaattttttgtatttttagtagagaaggggtttcaccatgttggtcaggcttgtctcgaactcctgacctcaggcgatccgcccactttgggctcccaaagtgctgggattacaggcatgagccactgcccccggatgattctagagttttagacttagaaggcgtattggagatgatttataattgagccatttatttatttatttatttgtttgtttatttttgagatggagtcttgctctttcacccaggctggagtgcagtggcgcaatcttggctcactgaaacctctgcctcccgagttcaagagattctcctgcctcagcctccagaatagctgggatttacaggcttgtaccaccccagccagctaatttttgtgtttttagtagagatggggtttcaccatgttggtcaggctggtctcgaactcctgagagttcatgcccggtgagccatttcattttataatgaagtctagacctgtagtaggtgcagttaagttgtctacctcattgacaaactctaggctagaaccaggtctgatttaaggctcaaggctgttctactatatggaattctccctcctctgagattccttggtggaagaaaatattctcctgaggacccatgtgtaaagcaggtacactggctctactctctagttgaaggtggctggggactccaaccttgtgtctgcttagcgggacacatagggtagccccattggaacctattggaagggtggcccacctcctcccgcagccactcggtcccagtgagcgacctgctcaccaaggaggctccttggagcacagtctgaagatcaccctgcacctgccaccctcgccacagaggtacttgttagtaaaatgagcgtctctcaagagacgctaagcacatcctaatattatctaaggcaggaatccttttgttttcattgctttctttactgtttaaccgttctggccaggcgcggtggctcatgcctgtaatcccagcactttgggaggctgaggcgggtggatcacctgaggtcgggagtttgagaccagcctgactaacatgagaaaccccgtctctactaaaaatacaaaattagccaggcgtggtggcgcatgcctgtaatcccaggtacttgggagggtgaggcaggagaattacttgaaccagggaggtggaggttgtggtgagctgagatcgcaccatcgcactccagcctgggcaacaagagcaaaactctgtctcaaaaaaacaaaaacaaacgaacaaacaaaccaaaaaccagttcttgtttaacagttcctgttctgactgcattcacataaatgtgtatacttttagggattgatttgtggtctctagggatatggtgcacaatgcagaaaaatagaaacactcccctcccctccgagaaaagagaaggaaaggaaagaaaagaaaaacaactttttcatacagaatattattttcttttttgccctggcagggagccagtgcacttcatccaggcacccccagggtccccagagagttttcttgcgcacatttctgagaacggatttgggatcagggtggtgctgcctctggaatgacatgaatggaaatgccaaaatgcccaacagtgttccttgttctctttttttttttttttgagacggagtctcgctctttcgcccaggccagagtgcagtggcgcgatctcggctcactgcaagctccgcctcccgggttcacgccattctcctgcctcagcttcccgagtatctgggattacaggcgcccgccactgcgcccagctgattttttgtatttttagtagagacggggtttcacccttttaaccaggatggtctcgatctcctgacctcgtgatctgcccgcctcggcctcccaaagtgctgggattacaggcatgagccactgcgccgggccttgttctcagttttaaaccattttcctgaaatgcatctgcaaacatatcaaggcagaaattattgaaaggaagagattttaagtttgctgctggcgtcaatacctctgaatataaaggataaagactccttggattaatctcacagactttccccaaggtttcttgtaaatgtaatttggaaaatgttttccttgtctggtataaaaattttattctgaataagataattctataaaaagttttctcaagaacgagcacaattttgagaggttgttttattttattttaaattttctgttgagaagggaccaaggtcagggtcatgcgtgtgatttctgtgtgatccaggtggtttccttggtggcttgttctgggaggtgaagccagttggacttcttggtccggtggggacttggagaacttttctgtcttacaagaggattgtaaaatgcaccaatcagcgctctgtagctagctagagatttctaaaatacgctaatcagcaggctgcaaaaacgcaccaatcaggtctctgtggctagctagcggtttctaaaatgcgctaatcagcactctgcaaaaacgcaccaatcagctctctgtggctagctagaggtttgtaaaatggaccaatcagtgctcagtaaaatgcaccaatcagtgctctgtaaaatggagcaatcagcactctgtaaaatggaccaatcagcaggacatgggcggggacaaataagggaataatggctgaccacccctcccccctcccctccccccaggcaccttccaggctgtggaagctttgctcttttgctgttcactcttttgctgttcacactaaatcttcctgctgtccgctctttggtccgcaccacctttaagagctgtaacactcaccgtgaaggtccgcggcttcattcttgaagtgagcgagaccaagaacccaccggaaggaaccatctccggacacagttccacagccaggggacagtggaggtttggctagctgtctggcaaagctccggtttttttttttgtcataacgggcacagggaaaggagggcgggtaaatagatttgtgcaaacctttcaacactaatggaacagacaaggagcagatgctgtcctcctggctggtcagtgaaattgactctgtccatgaaggaagctgcattttcccagtgacttgggtggaagtacctggcgcaggagatagatacagggatcagggaagcaaactgttgttaacaaaaccctggttaaaagtaggtagtaattaacttttgctttttcttattgtgatatggaggaagttcctaaggctcttgaaagtcaatttagaaaccttgtgtctgattgcgtgagtgtgactgatactccaaagcaaagcgagtaatattcatttcagtaaggctgtcgtttcaggcgaatggagaatattatttattgtaggcattaaaagaaattaatatactttatttattttgagacggagttttgctcttgtcgcccaggctggagtgcagtggcgctatcgcggctcactgcaacctccgcctcccaggtttcaaggggttctcctgcctcagcctcccgactagctgggattacaggcgcctgccagcatgtccagctaatttttgtatttttagtagagtcggggtttcaccatgttgtccaggctggtctcgaactcctgacctcaggtgatccacccgcctcggcctctcagagtgctgggattacaggtgtgagccactgcgccccgcctaaactaaattaatatagtttaaacattcaacctctttaagagcttcccctctcctagggatgtgtaggtatgagatggggagtggggaatcacaacgttttgggtttttaaaaatgtgaaagtgtatgcacaaaggcagtaaatgtgtttttcagaagcagtaattactggaaaagtacatctaggttcattgctttagcggcctgagtgagatcgcagcaccctggctggcttgtgtgggctttggcctgttttctgttgcctggaggtctgtagtgttaggcaagtctgaaaactaggtaacacttttgccctgtatcagagaaacagactgagttctagaaatcagctaacttgtactgagaaggttttatgtatctttaacaaattcagcccaccgggagaggaaaaggagaatttcagactagaaatcaggaattttgtatattcccaagtgaagatttttcttgtaggttacaaggaggatgaggcgcaaatatattacaaatattaaaacggacaaaccaatcgtatctggaaaatgtagagttgtctggaaaaataatcttggaaactttactttttgtactatgcaacctctaatttacaaataacatccaaatcattcaaacgaacagcgtcgcagggctgcacaccgccagggggcgccatttacatgggacccagtgggagtagagcagtgtgatggcctgcaactgaccaacctgccttttactgccctttcatgctcccagcccctgctgctctcctgggttagaaattgaaagtttataccaaactcatgggtttacaagtggaaacatcacacccttagcatcgtctttcctgaacactccatctacaatagctttttcctcatctaaatctctggccaggcacagcggctcacgcctgtaatcccagcactttggggtgccgaggcagacgggtcacttgaggtcgggagtttaagatcagcctggccaacgtgatgaaaccccatctctactaaaaacacaaaaattagctgggcatggtggtgggcgcctgtaatcccagctactcgggaggccaacgcaggagaattgcttgaacccgggaggtggaagttgcagtgagctgagatcgaggctgcactccagcctggctgacagagcgaaactctgtctcaaaataaaatataaaataaaataatcttttccttaatattctcgctatttatatcctctattatctgcctctccacgcctgtttattccttcagagcatttatcgcaatttgtacttattttgtttaattgtttgttgtctatcgccatcattatcttttcaacatgtaatccacatgagaaaatactgatacaatcttttcacttatttttttcacactaagtctttgaaatcaggtgtgtattttccgtggacacgcatctcagtttcactggccgctctgcagtgctcaaggaccatgtgtggcttgtggctgccatactggacagtgcaggtctggtgcttaaacttagggtccacacatagtaaatacttgctgaatgaatggataggaagaagctgaggaaaacaggaactttttaaggaaccctgatcctctatgtcctcctgtaaaaggtttaaaattttttcacttgtatactgcctgaaattttaccaattagagattcttttgtatttaatacatcctcattaaaaaatttcttagtgatacccctgagaagtttgaaatcagtcacatatatttaggagttattgccgtcagactgctttcctcccaattcccggaggagtatgtatattagttttcgtttctttttttcgtgtttttttttttttttcccttggagtcttgctcttgttgcccaggctggagtgcagttctttcagctcactgcaacctctgcctcctggtttcaagtgattctcctgcctcagcctcccgagtagctgggattacaggtgcccaccaccacgcccggctaatttttgtatttttagtagagacgaggtttctccatgttggccaggctggccttgaactcctgacctagtgatccacctgtcttggcctctcaaagtgttgggattacaggcatgagccactgcacccggcctcttttgttttttactctgagacatagtcttgctctgtcacccaggctggagtgcagtgtgcatgatctcgactcactgcaacctccacctctcgggttcaagcaatcctcccgcctcagctttcttagtagctgagactacagactagcaccaccacacctggctggtcttgtatttttagtagagacagggtttcaccatgtaggccaggctggtctcgaactcctgacctccggtgatccacccgcctcggcctcccaaagtgagccaccgcgcctggcagtatattagttttctattgctgtgttacaaatgatcacaaactcagtggcttacaataacacccatttattagcacacaaattctgtgggtcagaagtctaggtgcagcatggctggattctctgctcagggtctcataaagctgacatcaaggcgtcagtcaggctgcctttctttctggagcttggagttgtcttcagggttcacatggttgttggcagaatgcagttccttactgcatccatcagttagaggctcgatcccagaggccacctgccgtgtcctgccatgtggccctctccacaacatggcagtttgctcttgcaaggctagcaggagcttctactgcaacttcagatctctccgacttgctgtctctgacttcttgattcttttccaaaagggctcaccaatcagtgggaatcttgggggccattctgcctctcctagggagattagctgaattagagaagtagttatttcttgaatctggaaaacagggctatggaagttccaggctggcatcatgaaaacatccattcacagatactttattgaactcctgctctgtgccgggtgctaggcctgcagcggctgacagggcaggtagatccctgccctcctgaagctcctaggccagaggacactggagaggttttattgccatttaaaaatagatgatggccatagttgcacaagtctgtaagtgtattaagaaccattgaattggtatgtaaagtacatctcagtaaagctgttttttgttttgttgttgttgttgttgttgttgtttttgagatggagtctcactctgttgcccaggctagagtgctatggcgcaatctcggctcactgcaccctccgcttcctgggttcaagcaattctcctgcctcagtctcccgagtagctgggactacaggcacgtgccaccacgcccggctaattgtttgtatttttagtagagacggggtttcactgtggtagccaggatggtctcgaactcctgacctcgtgatccacccacctcggcctcccaaagtgctgggattacagacgcgagccaccgtgcccggccaaagctgtttttttagaaatagaagtgcttacagatttgtttgagcagaatagatacccatgttcagagagagagagagagagccattgagaggcagagagtgccgaatgtgaattctgtgtaaattgaaaagttacggtccccgtccataaggagatggctctggttgtcttgaatttagacagctttccagaggaggaggttctctcctgcagcagtgtgggaaaaaaatctaccagatttggaccagaatgactgcaatttaggtcagaacatgatacttagagggaaaaaagtaatcatggcttgaatagctgccctaaggccagctacagggctgcaggggtctgtggaacctttcttgtcagaactcaggatccttaggagtccccacaagggcatggaggctgtggccatcatgagtggaagaaccagcttccaaaggaacctaggattgttctggccctggctccaggtgcatatctctgctttccgtgagcattgaatgggaaatcacgtgttagcagaataaatcccagaatacacattcaggaggagatggttccacatggcacgtaagtcctttgccttattgatgtttgtctggcagatgtccttaagccttcccatcaagggctttattctaagggtggctaactggctatttaaacctcatctcaatagtgtctgtctaggatggcaaaatcacaccaggttctgctgggcaaatctcccaggtggcgtattgctagaggagagcgccactgcagaggacacactgtcttggccactggctttgcaaaccatagtggaggagggagtctggggtcaccaaccacttcctggctgactgcctgagccacattatacaagactgtttgttgacttagtaatactgaagccagagctcaccaagattctgacatcaagcatgaaagtgactaattctttcatttcccagcactttgacaaaggggactctcttaaaactcctcatcggacgttagtggaagtcgactcatgtatctaaacatgtagccagcgtaagttcttggtcagattgatctaatgacttttttagcgtgtgtgtgtgtgtgtgtgtgtgtgtttaatctttttaagtttgggtgaagtttgaccttctagaattcctgtttattcctgagcaaagaaaaaaaaatcaaccctttttaattcctttagcatcatatctgaccatctttagggtgttgtttctttcctagactgaatcactcagagaaataagattggccaacaaatgtaatttgatgataccctataataatgttgtttaagtacctaatctaagccgctaatctccaaagactgttcccccgccccatgtcatcttacacacacacacaggcacaaaaacacacacattctgttctgattatatttgctgtattaaggccaaatccaggtgtttctgagcactagtttgtgtgtttttatgttgaaaataactagtttatgtatttatttatttatttatttttgagatggagtctcacattgtcatccaggctggagtgcagtggtgtgatcttggctcactgcaacctccgcctcctgggttcaagtgattctcctgcctcagcatcccaagtagctgggattgcaggtacccaccgccacgcccggctaatttttatatttttagtagagatggggtttcaccaggttggccaggctggtctcgaactcctgacctcaggtgatctgctcacctcggcctctcaaagtgttgggattacaggagtgagccaccgcaccgggccaaaaaatccaatttcttagagattaaataacccttcaggattatcaaaggaaataattagggaaaggtagatgttctgtcccagtaagagaagaaagtggtccagaaattttatctcccatcaaatgatccattttacttaagtattaaaccaagtgacattcttcagtttaactctgataaatgaatcatattcctcttcgaaaataacttttgtatttcgtgctctaaaaagagaaccacccctacactcttggaaattattccttttaatggcagtaaaaacctttggctttcataggcatcatcagcagagatgttagttcatgagcacctgtgagtttctcaaaattagtatctgaaaatgatgggaacacacaagcgataccatcatgtctttggcacatttagttgaaaacttaaaattcttccggtggaggtaagcaaattggaaggtattaaaaatgatcagagtgtactattcagagttatagatttacccttccatccaagatggctgcgccttggaaacccccagctcacttttactagcagtgcctccagatccagtttctaaatcacacagggagattaacattattcttttatagtcacactgcatgtggactaaaataattttttttaaagagaccggggtctcgccatgttgcccaggctggtctcaaactcccgagctcaagtgatctaccagccttggcctcccaaagtgctgggattataggtgtgagccgctgcgcttggctaaaataaatattttaaaatttaacacgattattattttgaaattggaactctaaaagacttttcaaaattcaaaatgatcaggaatgttaaaaacaatgaaaaaaagcacccctaaacctgccctagattccccaggggagagtcaaagatgttttgctttgtatcagcactattgaaataaacatattgtcacctaaaaggaactatttgaagaggactgcacttcactggatgtgtatatcctggtgagttttttattaatgtttattgttttttaaaaaatgtgttaaaatggctgggtgcagtggcttacacctgtaatcctagcacttcgggaggccaaggcaggcggattacttgaggtcaggagttggaaaccatggtcaggagttggccaacatggtgaaaccccatctctactaaaaatacagaaaagttagccgggcatggtggtgcacgcctgtgaccccagctactcaggaggctgaggcaggagaatcgcttgaacctgggaggcagaggttgtggtgagtcaagatcgcaccactgcactccagcctgggctacagagcaagactccacctcaaaaaaaaaaaaaaagcagaaaaatgtgttaaaaatatacacataacatttgccatcttaaaacttttcgagtgtacagtttcagtagaattgggtacacttacattgttgtccagccatcaccaccgcccatcttcagaacagttttcatcttgcagaattgaaactctgtatccatttaaccctaaatccctatttctccctaccccaaagcccctggcaaccaccatcctactttctgtctctgtgaatttgactactctaggtatctgatcaggtttttttttttaattggttattacttatcattaaactcattcatcgtttcttgaaataaacccaataaactttaatggaagctcataagaatttttttctgaattctgccctctgtcaaaggaagaaaatgacaacatggacgcatatctgtatttgggtggcattaatgactcagtgaccttcacttttgcagccagcgaaatacttggcaattttaatttagaaatattactgtatcatcatttaacagaaatacttactaaagcagaaatatactgactttagaagcatttcaaagaagcagggttggcactgaccagtgttctcttaaggtagaagacagaatatttgactaaagacagtgctgtagcaggtagaaatagacattatttagaccccttttctgagtaaggaagaccagttaaaatgttagcttattttttgggattttagaaatgtttaactcaagagaaaaatataacttaagtcagtgtaatggcgtatgaataagttaaccgtgtaacattttcttttttcttctgcctcagcctcgcgagtagctgaaactgaacaggcacccgccaccacacccgcctaatttttgtatttttcacagagatggggcctcaccacattgaccaggctgttctcaaactcctgacctcatgatccacccatctcagcttcccaaagtgctgagattacaagcgtgagccaccatgcccgacccatcttattttttaaagagggagtttagtactgattcttagatcaaaagcagccaaatccccagtatcacagaagagatgagggtctggttatgtggcccaggctggtctcaaactcctaggctcaagtgatcctcccgccttaacctcctaaagtgctgggattacaggcatgagccaccaagcctggccttctttaacctttgtgttgtaaatgtgtaatgttttggtaacagtaagggttaaataaacaccttttctccctagtaggaaaatgcttctcagattggattgaaactctgaagaccaacatttttctagatactttcttggatagtgttcatgacaaactgctacttgaaagtggcaggaccattgtactataaaatctaataaagcccaggtcattggctatagggagttgaaagctctatttgtagacatcactaggagaactgacaagaatgaaaatgttacacagttaaggccgggcacggtggctcacgcctgtaatcccagcactttgggaggccgaggcgggtggatcatgaggtcaggagatcgagaccatcctggctaaaccccgtctcgactaaaaatacaaaatattagccaggcgtggtggcgggcgcctgtagtcccagctacttggggaggctgagatagaagaatggtgtgaacccgggaggcggagcttgcagtgagccgagattgtgccactgcactctagcctgggcaacagagtgagaccccgtctcgaggaaaaaaaaaaaaggttgccaggagcagtggctcatacctataatctcaacactttgggaggatgaggtaggaggatcactgagcctagaagttcaagaacagcctggccaacatagtgagaccccatatctatttatgtatatattttaaaagttatagaaaacaacgctcttattaaactggtaattagcaactaaagtagaaaaacatcactggatagatggctgagaaaagggatctgtaatcacctgcttatctggacaggttttttcttttttttttttttagagatagggtcccactctgttgcccaggcaccatcatgactcattgtagcctcacacttctgggctcatgctatcctcctgagtagctaggacaacgggtctgcaccaccatgtctggctaatttttttctttttgtagagatgggcggggaggtgtcttgttacattgcccaggctggtctcgaactcttagcctcaagcaatcctcctgtcttggcctcccaaaatgctgggattacaggtgagagccaccacacctggcctggacaggtagttttgaaaacaggggttatcactagagaagtctgtgcttgagctgaggagcatgtcttctgaaatgtgtaaatttcctatagttagttccctggtggcgtggccctccatcaagaacattttgctgagttttccctgacttaaaataataacagtgatgctggtgctgatgaaaagactgatgtggcccttacatcccacatgaatcatcattcgggattattgtagcctccataaaagtgacgcagtggatgaaagtggtttttctcaatacttaaaaacactgtgaaaatgagataggtttaaagatataaatgtgattttttaaatcctgcccccccacccaagtgccaggagtttggtaactagaattgcatttagtcatcggggtacagattgtactgtgcgggctggagactcaaaccctgggctattgaaggccatgacaaatgctcattttttaatattatgtttttgctgctcatgaagaagcatcatgttcaaaatgaaaaatctttagattcaggacttaatagttcacctcttttggattgcgtttgacggaaacttggacacagctgagtgtaattatgcttttcagcagcatgacttatagtactgcagatatgggcatactttgagatttttctttttgccaaaatttgtctgaaaaggagcttggtggtggttgtgtgtgcttgtgtgtttttaaggtaattaggctattagaggtccaaatggaataatccccttaagccttttcaggaaaaacactttggaaaggttaagtaaatttaaaattagccattatttacgtaggtgctcagccttttgaccatgttctctaggagttgtttcttttacatttaggttatgtttgtcagaaaccatcttattttttatttttatttttctttctttctttatttttgagatggagtctcattctgttgcccaggctggagtgcagtggcgtgatctcagctcactgcaacctctgccctcaggttcaagcaattctcctgccttagcctcccaagtagctgggattacaggcaccggccaccacacctggctaatttttgtattttagtagggacggggtttcatcatgttggccaggctggtcttgaactcctgacctcaggtgatccaccagcctcggcctcccaaagtgctgtgattacaggcgtgagccaccacacctggccttatttttattttttgagatggggtctctctgttgcccagactggagtgcagtggtgcaatcactgctcgctgcagccttcacctccctgagctcaagcctcagcctcctgaatagctgggaccacaggtgtgtgccactacactgggctaattaaaaaaaaaagtttagagacagggtcttgctatgttgcccaggctgtttttcaactcctgggctcaaggaatcctcctgcctcatcctcccaaagtgctgggattacaggtataagccatttcacctggcaaccatcttatttttttaaatttatttttatttatttattttttgagacgaagtctcactcttatcccctaggctggagtgcgatggtgtgatctcagctcactgcaacctctgcctcccaggttcaagcgattctcctgcctcagcctcccaagtagctgggattacaggcgcctgccaccacgcccggctaatttttgtatttttagtatagacggggtttctccatgttggccaggctggtctcgaactcctgacctcaggtaatccacccgcctcggcctctcaaagtgctgagattgcaggcgtcagccaccacgcctggccgtgaccatcttatttttttaaagagagagttcagtactggttctgagatcaaaagcagccagatccctggtatcacagaagcttcatcacggattcatctatttttcatctccagaatggccacctcagtgctgtcctggccaaaaatctgttctctagacctggagaaggaactgccctgagggtcttccacacctctctttttgagaaaagttaagaacaaagtaaaaagatgcagtggagaaatgacgtcgggggttaatggattgggattttagggctggagtccaggcttatgttgctctctgctgagctcaggatctgcactgaacatctctctaaatcatgggctggggtaaaacctgcttacactggctcagaccggaggactttgcagccacctcaagacacacgtttgggtgtgtcccatctccaatcaggatgttcaacttgctttcttggatctttttgaattgcgaatttggccatagctgaccacttgtttttgcatcaatacttcaaagggttcaaggccaggtgcggtggctcacgcctgtaatcccagcactttgggaggccgaggcgggccgatcacgaggtcaggaaatcgagactatcctggctcacatggtgaaaccctgtctcgactaaaaatacaaacaattagccgggcgtggtggcgggcacctgtagtcccaactactcgagaggctggggcaggagaatggtgtgaacccgggaggcggagcttgcagtgagccgagatcgcgccactgcactccagcctgggcgacagagcgagactccgtctccaaaaaaaaaaaaaaaaaagtgttcaaattttaagtcctggtaatttatcccctcccatagcaagtattggcgcaaaagtaattgtggtttcagaccatgaattttaaatcattgtaactaggcccaaatacatctttattaatcaaaataatcaacacatttttgccaatgagaaataagtttgttttttcctttaatgtaaaaatctgtgcttcgggattcagcgaactcttggaaagcatttttttcttcatcctgctggttgtggaagcgtttttctgtataaaaagttgtcgagatgcttgaagaagtggtaatcggttggcaagaggtcaggtgaatatggcggaggaggcaaaactctgtagcccaattggttcaactttctaggcattggttgtgcgacgtgcagttgggtgttgtggagaagaattgggcccttcctgttgaccagtgccggctgcaggagttgcagtttttggtgcatctcatcgatttgctgagcatacttctcagctgtaatggtttccccaggattcagaaagccgtaatggatcagaccagcagcagcgaccaccagtgaccgggatctttttttggtgcaagtttggcttttgggaagtgctttggattttcttctcaatccaaccactgagctgatcatcaccagttgtcgtataaaatctatttttcattgcacgtcacaatccgatcgagaaatggttcattgttgtggcatagagtaagggaagacaacacttcaaaacgacaatgtttttgattttcgctcagctcatgaggcatgcacttatgaagctttctcacctttccaatttgcttcaaaggccgagtaaccatagagtggttgacgcagagttcttcggcaacttctcgtgtagttgtaagaggatcagcttttttttttttttttttttttttgagacgcagtcgcgctctgtttcccaggctggagtgcagtggtgcgatctcggctcactgcaacttccgcctcctgggttcaagcgattctcctgcctcagcctcccgagtagctgggattacaggcacatgccaccacgcccggctaatttttgtatttttagtagagacggggtttcactgtgttagccaggctggtctcgaactcctgaccttgtgatctgctcacctcggcctcccaaagtgctgggattacaggcgtgagccactgtgcctgtcagagggtaaactttgatggttgttctcagttggtcgttgtcaactttcaatggctgggcactagcttcatcttcaaggctctcgtctcctttgaaaaacttcttgaaccactactgcactgtgcattctttagccattcctgggggcaaatgcgttgttgatgttgagagttgtctccgctgctttaccacacattttgaactcgaataagaaaatcgcttgaatttgctttttgtctaacatcatttccatagtctaaaataaaataaacagcaagtaataagtcattagcaaaaaaagtgaaagaatgtgcattaaaatgatgtataacataaccacatttatttaagaatgtattccaatatcaaatggcaaattccaacagtgcaaaaacttacccctgaaaacaggcatagtcactttcaaacttgatttttctttcattttactctaccttttcatttgatgaaacacctttgcattttatctccctgagccaaagtacctgtaagttgcccggagttggggttggtgcaatactgtggaagagtgtggacacggaagacctagtcagtccttgctgtgtgatatcaatgatttgattgagaaagactcattttcctgggcctcacctgtcaattttctcaactgtcaaatgccctcttttggcctgtattaggggctgatctcatgcaatacggagcctactctgcaaatacaaggggtcatggtcattgtccatttgtggggagtgtgaaaacacctggtgatcatgatgggctaggtactgtttcacactttaaaatgcctttattttagggggaccctctagtgccataggtattttggagtctctgctttccaaatggcctatgggaaatcctgagatgtccgtgggatctaactttgcccagtgggaatgttgtgtcatagtcataaaggcttaaggattagtttatttccagccctgcaggggctataaattgctactttaaatttcattccagcaccctgatgtttatgttgctatggtggtgtgtctcttgctcgggtgacaagattgccattggaaataggccaaaataacagcctaacaggtggctgtgctttgggaagtcatttgcaaaactattttgcgaagaagtctggtgcaaataagtcacatgactgtgcccttaactgtagtttatagtttagcatttttttaaaacgcattcctccccctttccgttttatatatagacttttttcctctttcaagtagtgccgtgctgatttcctgtagtaacacaaggaaagatttcagctcattttatttagcagtggatgtcctttccttattttttgtaaccagagccctctttctaaaaataacccttcttttcctaatgtgattcttcttatagctgatgtactctatttaaatgaaaggcctctttttaacatgcccattttaatcgatatatatttattacatataactatatataataaaatacatatataaatatataataaaagtagatttccctgtagggtctaatccttcgtgaatgtggtagcagaaattgttcgttacgctttcacctgccaattatgattgttttctttctttctgtttttttttggagatggtgtctcactctgtcatgtcacccaggctggggtgcggtggtgccaactcggctcactgcatcactgcaacctccacctcccgggttcaggcaattctcctgcctcagcctcccgagtagctgggattacaagcatgcaccaccacacccagctaatttttgtatttttagtagagacggggtttcaccatattggccaggctggtctcaaactcctgacctcaagtgatccgcccgccctggtctcccaaaatgctgggattacaggcgtgagccaccgcgcctggccagttttctttcttttgagataaaatcacggaaagaacctgagtattaaaccagttaaacttcctacccacttaagagtcctttctatgataatcttggatggcaatcatcttgcctttgggcttaataccagccatcgcttgggtgtgggctctttttggtaatacaacctctatgattttccactttgatttgttggaagatgctttctcatgtttagttggtatctgactccttagagctttcaggatcgtttctaccactatagtgacaaacacaagccctttccacatgctgactctttaaacatttaaagaaatctataatgttggctgggtgcggtggctcatgcctgtaatcccagcattttgggaggccgaggcaggtggatcatgaggtcaggagttcaagaccagcctggccaagatggtgaaaccccatctccactaaaaatacaaaaattagccgggcctggtggtgggcgcctgtaatcccagatactcaggaggctgaggcagagaattgtttgaacccaggaggcggaggttgcagttagccgggattgcgccactgcactcaagcctagaagacagagtgagactctacctcaaagaaaaaaaaaaaagaaaagaaaagaaatctagattgttctcctttgatcttctcttccactggcttgctactctcaattccttcagattgaatttatgaaatgcttttgtctccctcaccattcctgtggttcctctttcttattgccctttagaaaatattgaacgcaatgcgttacagcagaggtcaactaactttttctgcaaaccgccagatagcaatattttagacttgcaagccgtaaggtctctgttgcaactactcaactctgacctcgtaacatgaaagcaggcatagggcaacatgtaaatgaataggcgtggctgtgttccagtaacattttatttgtggacactgaaatttgaatttcataaaattttcacatgccacgaaatattatgtgccttttgctttttcttttccaaccatttaaaaatgcaaaacccatttgtagttggagaggcgtacaaaaacaggctatgggctgcatttggcccatgggccgttatttactgatcttagatattggaggaccagtgctgaaaccactggaacttcagctttaacactagcactgtcattttcagaagccgcatcaaactgctggctgcttctgacaaggtggtcagttacacttggtcttctccaccccccatcccccgcccctccgccatttcctgacaaagctgtctctctaacctgtgggtatgtgttctgccgaaaacaagcagccataccacagcagccgtaaccataggactttgaaacaaatgcaatgaatggcatccactagtttcaagtttgaccacatgtttttattgtttgtttgtttgttttttgagttggagtctcgctttgtcgcccaggctggagtgcagtggcgcaatcgctgttcactgcaatcttcccctccctggatcaagtgattctcctgcctcagcctcccaagtagctgggattacaggtgcccaccaccatgcccggctaatttttgtgtttttagtagagacagagtttcaccatgttggccagactagtccggaacgcctgacctcaagtgatctgcccaccttggcctcccaaagtgctgggattacaggcgtgagccaccgcgcctagcctgaccacgtttttgattcttgcttctgttatatctgtattaaccgttcttcttagcttcgtggcagatgtgataagcatgcctttgtgtctttctctaagtcactgacttttcagtaacatctaaatcataaaacataggtctggccaggtgaagtgcttgtgcctgtaatcccaaggggccaaggcgggaggattgctttagtccaggagttggagactagcctgggcaacacagtggacctcatctctacaaaaaaaaaaaaaaaaaaaaaaagtcatgactgctttcctttgttgcagaaaccagtaggtatttgggtgtagaaatgaaaccctcaattatattcataaggctaaaaatgaactattccctacttcctcatttgttttgatttttaaaataaggttctcgttagatattttgagaaacagtttaagattataattttgtatgcagaggagaaaatttagaaaatggtgaagccaacttttttagtgtataaacatttaatcataattatatatgtgtccgtgtggacatttatttaccaaggctttgctttaaggggaagggagaacacagagggccaacatttatggaacattctagtgggccaggcccaatgtgttaatcatctcatttcaattttgcagttatcctccaaggtggatcctattatcttcatttaacagacgtggaaattgaggcttagaggatttgacaaaattacccccatcattaatggcagagctgggtgtaaaccctgggcttggactggcgttatgtctcacggctgtaatcctagcattttgggaggctgaggtgggtggatcacctgaggtcaggagtttgagaccaggctggccaacatcctgaaaccctgtctccactaaaaatacgaaaattagccgtgtgtggtggcaggtgcctgtaatcccagctacttgggaggctgaggcaggagaatcccttgaacctgggaggtggaggttgcagtgagccgagattgcgccgctgctctccagcctgggcgactgagccaggctccatctcaaaacaaacaaacaaaatccctgggctttttggctacaaattccattccaacaacacctttgttttgcataaccaaagagaagttgatgttaattcattgtcaagttatttgtaccgatatactaaatatcctaaaatggggatatgttcctcaattatttactggaatggtaacatttctggagcatatatcttcaaaactgtaatgtaaattaagaatatgaacattctcagtggaaaatgactgttcaagttaacattatttgcatttgccattcttttgtaaagccagaaacgtagatacaattttagattaccttcaagctattataaatcttgagggaaaccttgattgttttttagaaaaatatgtctatctagactgtgtcttgcaaacaggcactttaagatgtcattatatgaatattcagaaactcagatgtaatagaacctagatgagaatgtgtgataatctaaagatatcatttaagtcagggctttaaaaatacatgacttcaagtgaaaaactgagccttgtaaagaagttctttacaattcaccaagcatgctctaaacctgcatccatcctgagttctttaaaagcagacttataaaagggagatgaaagatattttcaaaatatatttttgaagcacaaagtaaaacatatttaatattttaattgtttgaaatgagttgcttaaactagtagctgctgctgggaatgacaaaagcttggctaagattattctatggggaagctggtttatggctttctggagctggtggccaggcatggtgtagattatgggttgcttgtaggattatgtttgttattgcctctttttttaactccctataggagcttttatagtgctttgcacatggtggttgcttcgttgaggatgactaccagtttatggtcatttaaattcagatttagggccaggcaccgtcactcacgcctatgatcccagcactttgggaggccgaggcaggcagatcacctgaggtcaggagttcgaggctagcctggccaacatggtgaaaccctgtgtctactaaaaatacaaaaattagccaggcatgatggcgcacacctgtaatcccagctacttgggaggctgaggcatgagaatcacttgaacccaggagttggaggttgtagtgagccaagatcgtgccactgcattccagcctgggcaacagagtaagactccgtttaaaaaaaaaaaaattcagatttagggacaggcgcagtggctcatgactgtaatcccatctactggggaggctgaggtgggaggatcatttgagcctgggagttcagggctgcagtgagctgtgattgtgccactgtactccagtctgggtgatagagcaagaccctgtctcaaaaaaaaaaaaatcaaatttaattttgtgttgattgtggcttaaaaaacaagaaaaatatattgctgttcaaaaatttttattttttattggatattgcacgggtatgaatcaatttacccataaatctatcgtccgtttaataagtagaatgttacgagtttactcaacattttctttctttctttctttcttttttttttttttgagacagggtctcgctctgtcgcccaggctggagtgtagtgtcgtgatctcagcttactgcaacttctgcctcctgggttcaagcgattctcctgcctcagcctcccgagtagctgggattacaggcatgcaccaccacgctcagctaattttttgtatttttagtagagatggggtttcgccatgttgcccaggctggtcttgaactcctgagctcaggtgatcctcccgccttggcctcccaaagtgctgggattacaagtgtgagccaccatgcctggcccctgttcaacattttctatatgtctcttcctgatcccagaccttctgtacatatgacattatagatgatttagtcttcaataacttgctattttttcctagtaacttttcaaagagatatcattcacatgccacaaaattcattcttttaaacaaatgtacagatccctagtttttagtatattcttaaggttatgcacccatcaccactattcaattctagaatattttcttttccctttttggagaatgggtcttgctatgttgccgggctggagtacagtggcttttcacaggcgcgatcatcacgcactacagccttgaactcctgggctcaaacatttctcctgcctcagcctcctgagtagctggatttcaggtgtgtgtcaccttgcttggccaattctagaatattttcactactcccaaaagaaacctcgtatccattggcggtcactccccatttccctgtttccccaaccactggcagctactaatctatactttctgtccttatggatttgcctattctggacatttcatgtaaatggaatcacacaatgtatggccttcatgtttggcttcttttgcttagcataatgtttaatgaaaggtgtgtgttgcagcatgaagcagtaagtacttcattccttttcatggcttaattatgtatatattatatatagtttttttttttttgagataaagtctcgctctgtctagcaggctggagtccattggtgcgatctcagcccactgcagcatccgcctcccaggttcaagcgatcctcctgcctcagcctcccgagtagctgggattacagatgtgtgccaccatgcccggctaatttttgtatttttagtagaggcagggtttcaccacgttggcaaggttggtctcaagctcctggcctcaggtgatccatccacctcatcctcctaaagtgctgggattacaggtgtgagccaccatgcctggcctcatggcttaataatatttgattgtatggatatacatatatatttcggacatttgggttgtttccagtttttggctattatgaacattcacatacaagcttttatttaaccacttgctttcagttctttgggatatatacctaggggtgggattgctgggtcatgtgtaattttatgtttaggtttttgaggagctgccaaactggtttccacagtgcctgcaccgttttacattcccacctacagtgtacgatggttccaatttctctacatcctggccagcactgtactttctgtctttttggtcctagccattctagtaggtgtgaagtggtatctcattgtgattttgatttgcatttccctaatgactaatcatgttggaaatcttttcatctactggcaatttgtatatcttctttgaataaatttctgttcaaatcctttgtctagttttcagttgggttacatgtcttcttttgttgagttgtaaaacttccttatatgttctcgatgctagaccctcatcaaatatttgatttgcaaatattttcttccattctgtggtttgtcttttcactttttcatagtgacctttaaaacacaaaagttttaaatttaaaaatctaaaataaggccgacgtggtggctcacgcctgtaatcccagcactttggggggctgaggtgggcagatcacctgaggtcaggagtttgagaccagcctgaccaacatggagaaaccccgtctctactaaaaatacaagattagctgggtgcgtgtaatcccagctacttgggaggctgaggcatcaacctgaatcgcttgaacccaggaggcagaggttgcggtgagccgagatcacgccattgcactccagcctgggcaacaagagcgaaactctgtctcggaaaaaaaaaagaaaaacaaaaaaaactaaaataaattatttttttacatcagataggcaatgtgctgatgtcatagtaaggtttgagagcggcacatctcagacatgagtgtgaaaacccaatcgctgtgcttgtgaaccacaaaaggatcataagttttattttattttattttttgagacagagtcttgctctgttgcccaggctggagtgcagtggggcaatctcgattgaacgcaacctccgcctccccagttcaagctattctcctgcctcagcctcccagcagctgggattacaggcatgcaccgccacgcccagctaattttttgtatttttagtagacacagttttaccatgttgcccaggctggcctggaactcctgagctcaggcagtccacccacctcagcctcccaaagtactaggattacaagtgtgagccactgtgcctggcctaggatcaacatttttaaattttgataaagttcaggccaggcatggtgactcgcctgaggtcaggagtttgagaccaaccagcctggccaacatggtgaaaccccgtctctactaaaaatacaaaaattagccaggtgtggtggtgcatgcctgtaatcccagctactctggaggctgaggcatgagaatgacttgaacctgggaggcagaggttgcagtgagccaagatcgtgccactacactccagcctggacgacagagtgagactccgtctcaaaacaaacaaaaaaaaagttttttgatgaagttcagtgtttcccttccctttccctttcccttttcctttccctcccctcctctccctttcactctcatttcctttcctttccttttcctccctccctccttgcttgctttctctttcttccttccttccttccttccttccttccttccttccttccttccttccttcctttctttctttctctctttctttctttctttccttctttttctttctctagtcaaatgcagtagtaagaaagggggaaagaatagaacaagttcaatctgtaactcaatgtgaacaatcaattgagataactcactacgtttggaccagccttctttttttcttttagttccttgtgccttggtttaacatctaagaaaacattcctgaatgcaaggtcacaaagatttatgcctatgttttcttctaagagttttatagtttcagctcttacatttaggtctttggtccatttggagttaatttttgcatatggtgtggggtaggggtccaaattcattcttttttttttttttttttttttttgagacggagtctcgctctgtcgcccaggccggactgcggactgcagtggcgcaatctcggctcactgcaagctccgcttcccgggttcacgccattctcctgcctcagcctcccgagtagctgggactacaggcgcccgccaccgcgcccggctaattttttgtatttttagtagagacggggtttcaccttgttagccaggatggtctcgatctcctgacctcatgatccacccgcctcggcctcccaaagtgctgggattacaggcgtgagccaccgcgcccggccccaaattcattcttattcatatggatatccatttgtcccagcaccatttgttgaaaatacatttttccccattgtattgtctgaatcttgttctttttcactcaacattttgatcctgaaattgctgcatataactacaaatcatttcttttttttttttggtggtggtggcggggcggagtttcactcttgttgcccaggttggagtgcagtggcgtgatcccaactcactgcaacctccacctctttggttcaagcgattctcctgtgtcagcctcccaagtagctgggattacaagtgcacgccaccacgcccagctaattttgtatttttagtagaggtggggtttcatcatgttgtccaggctggtctcaaactcctgacctcaaatgatccactcaccttggcctcccaaagtgctgggattacaggcatgagccactgtgcctggcccacatcattcatttctttatggctaaaaaatagtatcctttgtataaatctgccatgatgtatttatttattctttgttccatacagattgggttgtttccagaagttgctattatgaacactattgctctgaactcacttgaacgtgcgtgcgtgagtttctctccagagtatgtgcctagaagtgtagtgtgtgcatgtgttctccaaagcgattgtcatacttatgcttctatcagcgatgtgtcagaactacgtttcagaaaacagttttaagcattctgtttgttctgtctctcattgaaaaaagtcattactaaaaagaaacaagtggtatttgcaagtgaaatttgccttttaggcctctaatattttattagcaagaattaaataagcaaaaggccaatagcttgagaacgtagtatgcaattagtatctctttgtttgatttattttattttttcacagtgaagacttaagtatctctttacattttaaaatattaatgtggaccttaaacaggtctttggctggttgaggtagtggtttgtttgtttttgagacagggtctcactctgtcacccaggcgggagtgcggtgcagtggcgcaatcacagctcactgcagctgcgacctcccaatcccgagtgatcctcccacctcagcctcctgagtagctgggaccacgggtgtgcactgccatgcccagctaatttttttgatttttttgtagcgatgaagtctcgctatgttgcccaggctggtcttgaactcctgggctcaagcgatcctcccaccttggcctcccaaagcactgagattgcaggggtgagccaccaaccgcacgggcctggtgaaggtttttgctgttagtaggtgagtctgcgtgttaattaaagcaacatcacaccagcctactattgctctcttaactagggtgtggagcaagtataatagagcagttgggctgcgctgggtggctcacacctgtaatcccagcactttgggaggccgaggcgggtggatcacaaggtcaggagttcaagaccagcctggccaagttggtgaaaccccgtctctactaaaaatacacaaattagccgggcgtggtgttgggtgcctgtaatcccagctactcgggaggctgaggcagagaactacttgaactcgggaggcggaggttgcagtgagccgagattgcgccactgcactccagcctgggtgacagagtgagactcccatctcaaaaaaaaaaaaaaaatagagcagtttacagaattgggtatgaatgggaggtgggagtgcttccttttcttggtacccacctattagcatacagtggttatgctaagacagaatcctgcccataatgatgagacacctgccctatttcatgatctcattcaatagtatcatgtgaaagggttgaaggatgcagaattgggccagtagtgctcagaaccttgaaagagttggaaattctctctggagtggggcaaatctacagcttataaagaaagcgagttgtcctggaaagcgcagcacataggtcaccagggatggccagcaggaggtaaagaaagtctcctagaaggtggttgggccggggaggtgagcagcctgcctggtagagaagcatgttggaaagtgctccacctgggagctggggcccagggacagaatgccacttatgaggcatgagtgagggcaggagaaaggaggaagtgacaagatgccccaggcctaggggaacctgtgtcctagtaggtcaccaggccctatgttaaagaaacgggaacctgaagaccagaaggcaacttggtgtcaggaacaaggtaacgttatgattggttatcataactggggcacgagatcagagctagatggacttgctccttattcctcttacagagagtaataatgattttcatcctgggggtacttaataagggctaagcacttatgtatattaatttgtttaatctacacaacaatcctgggaaatagattctgttactgttcctgtgttacaggaactgggaaactgaggcacagagaggggagtggcagagccaggatttgaacccagatactctggctccagagtgcaagctcccttcccatggtactgcacttcttctggaaaaagcatggtttagggagtcaaacaggcttggtttctaatcttcatttcaacctcttactatctttcttttatgaccttaggcaagtcaacgaaattttctgtgacccacagtttccttatttataaaataagaagcatgagattcagatcacacatggaagtgcctcaccccttgcctggccctcggtagggacttagtaaatagccattaatactactcctacaaataaacctttccaaactgagcacaggacttggcctggagcccggggcagggtttaatgtgtgctgaggatggggtaatttatctaggagggatgagaaacatgggggtcaaaattccaagtagatactgacaaaactaggtgctgatggcacaagctccaggagccttggaattagccaagttctccaactcgactggagactaggttaaaatctcaaagacctcatccctcatccctgtaattagcctcttgattgcctgtgaccttaccttaaataagccctgatttaacctaaaagagaagaaatcagaacatgacaagatctgctgtttcatcttcttacatatttctctttcatttatttattttttttgagacggagtttcgctcttgttgtccatgctggagtgcagtggtgtgatctccgctcactgcaacctccacctcccgggttcaagtgattctcctgcctcagcctcccgagaagctgggattacaggcgcccaccaccacgcctggctaatttagtatttttattagaggcggggtttctccatgttgtccaagctgatcttgagctcctgagctcaggtgatcctcccgctttggcctcccaaagtgttgggattacaggcgtgagccaccgcgcccggccttcatatttctctttatacttaacttcctttttccttatctttcccatttgcaagttactttctagttcttatcgatcatttccttattactgttttttcctccttaatgagttggttgctagataataccttcggtgtttttgagaatctgagaatgatggaggagaaatggaaagataggaatagaaagagattacattaggaattaaatttcttgttcctctttttctgatatgaaaccaaattggaggttagatcatccagaaagagaattcagtgttttccagttttccaacctgcttgctcataagaatgacttggagtggtagatcttgattcagtcgttctgaggatagcacaaagaatttgtatttttagcaaacactctccatgattatagtattatatgggaattaaacttaaaccttctttaaataaagcccccaagtttgacccattagctcagctatagaattactgaatatttttagtatggcaatactgtcaagaaaaagcactttataatgtgcttaattttctttctttctttctttctttctttctttttggaaaagtttaaggctatataaaaaatagagagaatggggcttctcgctatgctcagcctgtgtgtcatcattactgtcatgctggccattgttctctgctgctgtgcccgggccctgaggcctccttcacctctatccccaccaccactatccagtcagtttgctgctgcttccgtggttcacatgaggcagatgaggagtttgatgcatgctgggtgacatgcttcaacaagccagagatagatgcctgggaattgcataaagaattgaacacacttgctggctatgacctggttccagaaccccaaatcattgatgttgcttcgcaggcatgcagacagttcgatgcttttcctagggcagtttgcatcctagaggttgttaaggacaaggcaggacctcataagaaaatgtcatccaagaactcagaccaactttaaatgaattgggaatccccactccagaggacctaggcttagacaaagtgtgaaccccagggacaagcgttccagggatttattggtattgctacttgattgtaaacactcccctggaaatgctgatgataacatgttaccttatttgaacacctttttctttattgaataccaaaccatgttatggtaacttggactttaataaaagggaaatgagtttgaactgaaaaaaaaaaaaatagagagaatggtgtgttggactcccatgtaccctcaacccagccttatcagttttcaaaccatggccaagtaagaggcacttttgaaagagaacataggaggagttaccaaacagtaaaggcagaaattaaaagcaactgtgcctgctttgtttagaatacccaaaacctggaaacaatccagatgcccaccaataggtgaatgcatcaaccaattgtggtatatcttttcactggaatactattcagcagtgaaaaggaaatgaactatttatacatacaacatgcaagaagttaaaaataattatgccgaatgaaaaaagccccacccccccatatatactgtatgcatctatgcatataaaattctggaaaactatacatatgtaaaattctaaaggtctgcaacctgcattccaagggccaattccagcccatcacctcttcttgtaaataaggttttattggaacacgggcacactcaaggtattgcctatggatgcttttgtgttacaatggcagagttgagtagtggccatatggtgtgcaaagccaaaaatatttgtcaacccgcaggggttgaaacagacagtaaacaacacaaaataaatacaaacagataggaataatgacaaatcacagtcaatgccatgtcaatagagaatatctggggcaaaggggaaggtccagttgaattgaaatactcatcagtttctgagtgtgttctatagagtttttctgtctctgtgtctttgcacattctctcttttttatttttattttttgagacagggtcttgctctgtcacccaggctatatagtgcagtggtatgatcttggctcactgcaacctctgcctcctgggttcaagcgattctccatctcagcctcctgagtagctggaactacaggtgtgtgccacgaggcctggctaatttttgtattttttgtggagacagggtttcatcatgttcaccaggctggtctcgaactcctgaactcaagccatccaccctcctcagcttctcaaagtgctgggattacaggcatgagctatcatgcctgacctctttgcacattctcttgatctgttatgctgtttgttgccatctactgttgtcaaattctacctacccttcagggtccaactgaaatgccacattaccaggaaaggtttttctcattgtccctgccatacttcatttctcttctgcccttctgtagctcaggaccctctttaggtgtcactcccattagattgtaagtttcctaacaagacgcacgtcatcgtctccaaatcctttgggtcagcacagcctcttttatattaccagtctaagcccctttgtgtgacatttaaagtccgcctggactgactgttcagcctcatcctctgcccttcccttgtgtcctgggctctggccaaatcaaaccaccgttccccaaatgtactatgtagttaacttttaatattgcttctttttattgccttggttctctcaaaaatcagaattaatggaatgttggctattacaattacgtggacatggttatataatggccttggcgatgcccttaataaatgaaatctaaaatgttacattttttttggaacccagaaactcattctaattttattctgcctgaggctttatagcattttctgaagatcatgttgtactcttctttcgtctagatgatttggtcaacagtgataaagttccaacttagacttgataaatatgcaagagtcatgaaatatgaatgaaaacagtgacttttgaaaatcacgcttacctaaaaaaaaaaaaatcctgagtatggtttatatttactatgtgtgtaaaaatgtactgccattcttcattcttctttgttcgttaggttgaagaacaattgtaaaaattgaaggcatggcactaccgccgttatgtatagattaatgtggaaaatagcacgtggcgggtggctaatgactggagtcttacggacccaggtacttactgaaaaattcacttaattttggacataagacttggtcctttttttgtacataaatttaaatctccctttccttgtttacatgtattgctttttttttttttttttttttttttagacagagtctcgctctgttgtccatgctggagtgcagtggtgcaatctcggctcactgcaaccacaacctccacctcccaggttcaagccgttctcctgcttcaacctcctgagtagctgggattataggtgccagccaccacgcttggctaatttttttgtttttagtagagatgggattccaccattttgtccaggctggtctcgaacacctgacctcaaatgatcctcccgcctcagcctcccaaagtgctaggattataagcgtgagccaccgtgtccagcccatgtattgctattttatttacaatggagcattgtatattttacccactgtcagatggcagatgcagcgtatttctgcctgcatcccttggcccccacctcttatcctggttcccaggtgcagggatgctgttgcactggcataggttcctggcatatttgagaagtacaatttttgctgaaccacgttcctcttttatgcaacttggcacctatgtcaccattcaagaacaacttatatcaacaatcagtgcccttaaaaggaaatgctcacaacattcagcattctctctgtctctctttttttctttttttgagatggagtttctctcttgttgcccaggctggagtgcaatggcacaatctcggctcaccgcaacctctgcctcccaggttcaagcaattctcctgcctcagcctcccgagtagctgggattacaggcatgcaccaccatgcccggctaattttgtatttttagtagagacggggtttctccatgttgatcagactggtctcaaaaactcccgacctcaggtgatccgaccgcctcagcctcccaaagtgctgggattacaagtgtgagccaccacgcccggccaacattcagcattctcttaaaaaaaatttttttttgagacatggttttgctcttgtcacccaggctggagtgcagtggcatgatcatagctcactgaagacttgaactcctgggcttgagtgatcctcctgcctcagcctagtagctaggactacagggacatgccaccatgcttggctaattttttacattgttttgtagagacaggtcttgctatgtttgcccaggctggtctcgaactcctggcctcaagcgatcctcctgcctcggcctcccaaagtgctgagattacaggtgtgagcagccacaccaggtccacattcagcaccctcttgattcttgagcccaccatggtgtcagcaaggaaagagaggcagaggtaatttaacctacatataatttcttggttgccagcctccctgagtcttctccattgtccttcagatctgtagtgtttaaaggcctgaattgaatctcttgtattttctgtaaaattctgatattctctgctgtgcatcatatttatatttgcacagctcttaagttatttctcaatcagctgcctcccagtagcacacctttgcagctggcaccattgaaaaggtttccctcagacatgggagctctgactgcttgaagtcaatgggggctgggtgcggtggctcctgtctgtaatcccagcactttgggaggctgaggcaggaggttctcttgagcccaggagtttgagaccagcatggacaacatggtgagaccctgtctctacaaaaaataaaaaaaattagctgggagtggtggcacacatctgtagtcccacctacttgggaggctgagatgggaggatcacttgagcccaggaggtccaggctgcagtggacgtccagccactgtactctagcctgggtgacagagcaagaccctgtctggaagaaaaaaagtcaatggaacaaggcagcgtattgaaatattctttccttgggaaatgtatgtcataaatccttttaccaacagatgatttggatctttaaggctcccaggcacatgactttattctcaggagatggttaggcagtagattaagatctgcttattgccttgagactatataaagctcccaatacctatttttattggagaccaaatttctaacttgttcaattggtctgcttatggcagtgctgctctcccagtcatgggagaagacagttttacatttaaatggaatattctaactttgcttagtaagtaaatactgacccaaagataaacaatgggagaaaatggaatttcagtgtttcatgcaaaaagttcctatcacaagggaatcgcagttttcattctttgggtaggtaggtagatttctccatgttctgtgaaactgtgttgttgcggggaaggaagcaaaagaacaaatcaatagctgaggatgggggcatattaggaatttttttttttctttttgagatggagttttgctctgtcacccaggctggagtgcagtggtatgtcttgtctcggctcactgcaacctccacctcctgggttctagctattctcctgcctcagcctcccgagtagctggaattacaggcccccaccatcacgccaggctaatttttgtatttttagtagggatggggtttcaccatgttggccaggctggtctcgaactcctgacctcaggtgattcacctgcctcggcctcccaaactgccgggattacaggcgtgagccactctgcctggccgtgagccaccccaccgggcctgaattttgcttaatagaatcatgatgaaaatgaatgcgcttgaccagagaaaatggacacttgtgatgacttgggtagtgttcagaaatcactcagcctgtgagaactttgtgcttcttaggtttggcttgatattacaaagctaccactggttacttttatgaaagctccccaggtaaggggcagaggacagcaacctgttggtccagattaacattcagtggtattaagcagagactgtggctttcaactataagtaaaagcatgcttgggggagaaggaggaagggagaaaaaaaaaaatgagaaagcagaaagatgcaacaggggttggcaaagagtcaggagcagggagtgagggggaaagtaggtacatgtggtggagaaatggaagctctcccaatggttccatcagttccaccacactggcacagattctagaagtttcctatttctggagtaggacgcagacatgatgcatttcctactaagacagatttctatccaggaaacatcatttcaagttgcagtgccaggctcgaggatccttctccgtcattgcttcaagtgtggtgggttcagtacctcctttaatgtaagagctggcccgtcttccctacctacttgggacactttctagttttgaccttaagtagggtatcaggaaaattccgagaaagggaagacactctttttcctgaattacagaatagaccaactcattagaaaaaataaattaaagaggccaggcgcagtggctcaagcgtatgatcccagcactttgggaggccgacgcaggcggataacttgaggtcaggagttcgagaccagcttggccaacatggcgaaaccccgtctctactaaaaatacaaaaattagtcgggtatggtggcaagcacctgtaatcctagctactcgggaggctgaggcagaagaattgcttaaacccgggaggtggaagttgcagtgagccgagactgtgccgctgcactccagcctgagtgaggctggagacccagagcaagaccctgtctcaaaaaaaaaaagagagagagagagaaaaccagaacccctttgtttcaaaaccatccacatctgtctatccatccgtaaagcacaaagttatcagagacaaatcatggtctcattttgcttcatgcattttggacctgacatgagtccgtctttgatccctgaggggtggtagaaacaagcaatgcttttcagagtgaagctaaaaaaggcactctgtggaagagaatatattttatagatcagtgattagtgagtcttttcatgacaagttttgtattaattatgatttgaaaacctccagtgcagggttctcaggaattactaagtgcccctgggtacagcaagaagcactggaataaagaatctcaatgtgtgaccaaatttctaaattcttgggggtgtacagaaattagccacttctattttctctctctctttctctctctccttccttccttcctccctcccctccctccctccctcccttccttccttccttcctcttctcttctcttttcttttctttctttttttctttcttgagtctttctctgttgccaggctggagctcggtggcgctatctcggctcactgcaacctccacctccttgggtcaagcgagcctctcactcaccctcctaagcagctgggattacagtcatccaccaccacgcctggctgatttttatatttttagtagagacggggttttgctatgttggccaggctggtcttgaactcctggcctcaagtaaactgcccgcctcagcctcccaaagtgctgggattacaggcgtgagccactgcgcccggcctcacttctgttttctacttgtgtttttatttccattgcatttcctgacttgtgtatattttctcgttgtagaagcacttagtgttttggcactcagacttactttccagtgtttcttctgatcaatcaatagccctttactcatactaactatatgtgatggaagcaaagtcaggaatgtctaatgtgggggcagaattcactatgaagctacttagaatttcaccagccatgaatgatacattatccatcatgttagctagaatatactgggctccagtctcttttgggggatctttagggtccttctgggtgcagaagggaagatgacatttcaggagatctctgcgcattccaccctggcttccttccttccaggtaggctgagagaaagctttcttcttgatggtgctagtgagaacttggcaggtggagcaggaactgttagtttttcactccctgttggagtcattcacacatacagctcatatagaagacggatgtcttttgtcttggtgccaaagacttgaaaacagagaacggtaacttttatttatttatttatttttgagatggtgtttcgctcttgtcacccaggctggagtgcaatggtgtgatctcagctcactgcaacctctgcctcctgggttcaagcgattctcctgcctcagcctcctgagtagctgggattacaggcactcatcaccacgcctggctaatttgtgtatttttactagagatggggttttaccatgttgcccaggctggtcttgaactcctgacctcaggtgatccacctgcctcggcctcccaaagtgctgggattgcaggtgtgagccactgtaccaggctagaatggtaacttttgaaacccatttttgttattctaaagtcttcacggtgtggtgttgggaaggctgggttgctgtgtcagatgggtaccctcaccccagttatggctgttctcacatccaattccaggaagcctcattcttgtgtggtcatagaaaagcaaccttaattttcctgtgtcttagtttccttacctcctagaaatgtggcaaagatgcagaatctgtttatttagtaaatatttatcaagttctgggaatacagcggcgaataagccaccaaatccttccttgatgggactcaccctctaacacagccaaggcaatgagagaccttccaggaataacattgagaggcaaattatgcatgtaggtgacacatgaggccaacaggaaatgacctcgaattgaagttgaaatttacagtgcgagatgagccaagaatctgtgaacccttagaactcaggcaaggtgagctggtgtgacttgcaggaagtatgactcaattgtgactgtacccaagaaggcttaaaccacatcatctgaaagaaggatgtgccaacatacgcttccaatgactaaaaggaggggcagagggaaaaacaaaacagcatgttcccaggcccatcctaggaggaaggaaggctattaatacattcctttgacattgtctacttaccattgcatagagttggaggtgagtggcatatggagagacagagatttggagacagactgagtttgaatcccaattttgtcttattaggccgtggacaagtcatttcaactctctaagcttcaatttcctcattatttattttttaaaatagagatgaggtcttgctatgttgcctaggctggtcttgagctcctgggctcaagccatcctcttgccttggcctcctgagtacatacaggtgtgagccaccacacccacctgcccagccctagcttgctcactgtctttctttttttcttttttttgagacagagtcttgctctgtcacccaggctggagcacggtggtgtgatctcggctcactgcaacctctacctcccaggttcaagagattctcctgcctcagcctcctgcgtagctgggattagactactacactcggctaatttttgtatttttagtagggatgggtttcaccatgttggccaggctggtctcgaactcctgacctcacgtgatctgcccacctcagcctcccaaagtgctgggaataaaagtcgtgagctaccacgccggtctagcttactcaaacaatgtctagtttgcagggtagtgtatgtacgtgcctcagtgtctttggtgtgatatacacttagtaaatgttagttcagctctaacagactcatctgagattttgattctgtaactcccaagagttcagtatgctagcatttttttttttttaacatgaggaagagttgggtaaggaagagctgtgttttaattgcattacggctcaactgctaactgttttgatatgttgaacaaagtccattgattcttcatggaggagtgcttgctggggagtgtgagtcagcacgtctgcgttattaacttgttcggaagctttttgtggcagattgattttaaaagcccccaaggaaacagaggattttatttaatagaaatattgtcagaatgacattgagatttgggtttagctttcaaatcactggatacaagttgaatcaggtcttttctctgacagatattggaaacatggtgtgttggagaaatactctccattgcctggcagggcccttaccttgggagagggggatgatatttgcctggagcaccccggtgaccccacctagcaggcctgactttctaaaggcaaggatgtgggcttggtacagagaggtggcgaaacctgaatattagtattttcaaatctgattactagtattttcaaccgacctgactaggcgcaaatccatgctcatttaaatgaaagtctacctgaaatcatgcctcactgcaaccatgcacttctgggcttaagcgatcctcctgcctcagcctccctgaaggtccacctgcatttgaataaggatggatgtgcgcccaggtatgtctttgtgggtttccatcctatagttctggagcaaaggacaaatggaagaaagttgctaaagaaaagaagagcgtttctgtggctccttcaagagcagttacagatttctgtcctgaagccaggagggaatatgtggcccaggtcccacagtggagagttgcaatgctccctcttgggcatctctgtcctcatttggattcagggctgaaacttcgggatcagtttcacagaagaggtttcaagtagatttcttgcagtcctgaaagtcacacttctctgaaattggtttaacaccaatccaaaacctattggtgttcctgttacattttacaactcttcatatgccacttaagaaatgacctctctagaattgtgactccagcctaggcaacagtgggagactgtctcaaaaaaaaaaaaaaaaaaaaaatagagttgaggatgaggagctcaagaataaaagtgagatgggatggacagagaaaaagcaggaaaactagcgaatggtatggtagaagccaatagagaaaggactttcaaggtggagggagagaatttaagagttgggacttctcttccagcaagaagaggaagaatggcataagagggactgtgatgtaggcactatgtcaccatcgtatttaatccaaactataactatgcaagattaccacttgaccttcaagaaaactgggctggctgggcgcagtggctcactcctgtaatcccagcactttgggatgccgaggcaggaagataacctgaggccaggagttcgagaccagcctggccaacatggtgaaaccttgtctcttctaaaaattcaagaattagctgggcgtggtggtgggcgcctgtaatcccagctactcaggaggctgaggcagaggaatcgcctgaacctgggaggcgaaggttgcagtgatccgggatcgcactactgtgctcctgcttgggcgacagaggaagactccgtctcacaaaaacaaacaaacaagcaaatatacaaaactgagctgaggagacaattcgacaattcatgcagtcaataagtaggttgcagaggttggagtacagtggcgtgatcggctcgctgcaacctccgcctcctaggttcaggcgattctcttgcctcagtgtcaggcctctcagcccaagctaagcatgtgaccttcgtgtatacatccagatggcctgaagcaactgaagatccacaaaagaagtgaaaatagccttaactgatgacattccatcattgtgatttgtttctgccccaccctaactgatcaatgtactttgtaatcttccccacccttaagaagtttctttataattctccccacccttaagaatgtactttgtgagatccaccccctgcctgcaaaacattcctccaaattccaccgcctatcccaaaacctgtaagaactaatgataatccaccacacttcgctgactcttttcggactcagcccgcctgcacccaggtgaaataaacagccatgttgtgcgcgcgcacgcacacgcacacacacacacacacacacacacacacacacacacacacacacacacacacacacacagagggagagagagagagaaatgacctctctagagaaagaagaatcaccatggtatgggagaatgaacccctcagaaatggtcacagcttattcaagtcctaaacccttgctatgggcaagggttgacaaactttttttttcttttctttcttcttcctgtcttctttcttttcctctctctttctctcactctttctctcccttcccctccctccctccctccttccttccttctctctcattcgctatttcttttctttctttcttttttttttagagacagggtcttgctctgtcacccgggctggagtgcagtggcgcaatcatgcctcattgcaactttgcactcctgggctcaagcgatcttcctgcctccacctcccaagtagctgggaccagaggcacacaccaccacgcttggctaattaaaaaaaaattttttttttaaagagatggggtctcactgtgttgcccaggctggtctcaaactcctagccttacgtgatcctttcacctcagcctcccagagtgctgggattacaggtgcaagccaccatgccaggcagcaaagtttttcttaaaaggccagaaagtaaatatttttgcctttgccgatcataaggtctatgtcacaaccactcaactctgccattgtagctcaaaagcaaccatagacaatagggtcaaggagtgagtgtgactgtgtttcaataaaactttatttaacacataggcctccctcctgcaatcccttttgctgatcacttcatagaccatcatacacttcctgtgctctttggagcttgaaaatcatactttggagtaagaaattcttttgaatataaattacatatgtttggctgtggagaaataggaatgcttttacactgttggtgggaaggtaaattcgttccaccattgtggaagacagtatggggattcctcaagactctagaaccagaaataccatttgacccagcaatcccattactgggtatatgccctaagaaatataaatcattctactataaagacacatgcacatgtatgtttattgtggcacgatttacaagagcaaacacatggaatcaacccaaatgcccatcaacgatagactggataaagaaaatgtggtacatatacaccatggaatactatacagccataaaaaggaatgagatcatgtcctttgcaggaacatggatgaagctggaagccatcatcctcaacaaactaacagaggaacagaaaaccaaacaccacgtgttctcactcataagtgggagttgaacaatgagaacacatggacacagggaggggaacaacacacaccggggcctgttggagggtggggggcgaggggagggatttagaggatggatcaataggtgcagcaaaccaccatggcacacatatacctatgtaacaaaactgctcattctgcacatgtatcccagaacttaaaataaaaataaaaaataaattacatatgtttagagaaaggaagcttccatatttatgtatcatcatgatttttttaaaaacttatttaatttgcatacaaatttgttccacatttgtttcctgtaaaatggattcctcataaatgcttggtaagagtatccatgtttgatgtgaaacaaactgatgatgcttgaattcctgtttactctgaagttcttttcacatgctggtgagttctgagcaccatgcttacatgcacctctcctttgcagcaaacataagttttgaggtccctgtgagtcctaatggcaccgaggtgctgtctcaggtgaccttctcctaatcctgaaaaagtctccatgattggccctggaggagttctcctggttgtctggaatgagttcatactaatagtcagggctctgggcattgtgagaccctggctactttctttctttcccacaatgtatactttctcactatttatttatttatttttttgagacagagtctcgctctgctgcccaggctggagtgcagtggtgtgatcttggctcactgcaacctccacctcccaggttcaagcaattctcctgcttcagcctcccgagtagctgggaccacaggcgcccgcaaccacgcccggctaattttttttgtatttttagtagagatggggtttcactgtgttagccaggatggtcttgatctcctgaccttgtgatcctcctgcctcggcctcccaaagtgttggtattacaggcatgagccactgcacccagccatgctttctcactatgaaaacctcctcggactcctcggactcctcacaagagtgagtgagctggatttgctgtattttcaaagtcatccttcattacacatgaacattggctgcacccgagcttggctgtgaactgattattctcaccagggcctgttaacacaaattccatcactcctacagctaaaaataaaccatatttaacaagtagaaacaaaactccaggcaaatacatcatctgatttgatggaatctttgttgaaaatgttaatggtggaatcagatgcttacctttaagatgggagattgcattccttcgtgagcaaggtgcctagaaatcaattccaactcttgatatgatcagagagattgatggatacctaagtgtctgaaatgataatagttcatcttgtctaagggcattcccccatttgtggcacattgtccttgacgatcagtcttctatttattttattattttattttttacagatggggttctcgatgtgttgcccacgctagagtgcagtgactgttcacaggcaacatcattgcacactgcaggcttgaactcctgggctcaagcaatcctcctgcctcagcttcttgagtggctggcactacaggcatccaccactgtgccaggctcagtcttctatttaaataatgctgctactttagagggtttaggaatatttagtgtttacagctagtgtctctgtaatatgaaaacatactgtgccttggctgggtgtggtggctcatgtctgtaatcccaggaatttgggaggccgaggtgagaggatcacttgagcccaggagttcgagaccaacttgggcaacataatgcccatctttttaaaaaataaaaaacaaaaattagcagggcatcatggtgcacacctatagtcctagctaatcgagaggctaaggtgggaggattccttgagcccaggaggatgaggctgcagaaatcgcactactgcacttcagcctgggcaacagagtgagaccctatctcaaaaagaaaaaaaaaaaaaagaaagaaagaaaacatactgcgcctagcaatacaaatagtgacctgcgggtaatgagattatagatgattttaaacattcttcttgataattttcctgtgttttacaaatatttaataatgaatatgtactactctaagaaaaacagtacaaaggttttcaaagttttttgacagtcatttacctgcagtaagtacgttatacatcccaaccccatataaactagcatttatgtatttataaacttaaaacaaacattagttaaccatttttttctacttgtcttgctttttttttttttttttttgagacggagtctcgctctgtcacccaggctaaagtgcagtggtgtgatctcggctcactgcaacctctgcctcccgggttcaagcgattctcctgcctcagcctcccgagtagctgggattacaggcatagtgccaccacgcctggctaattttgtatttttagtagagacggggtttctccatgttggtcaggctggtctcgaactcccgacctcaggtgatccacctgccttggcctcccaaagtgctgggattacaggcatgagccaccacgcccggcttttttacctacttgtctttacctcctgatgttttctgtttttctattctattttatcaaagaaggaagaaagaaaaaaagaaagaagaatattcatgtattgaccaggtaaaatgatttcatgaaccactgatgggtaaattgaaagctagtgattataggacagtggttgccagtcttgtatttcatgggtcagtaaaatttaaaagaaattttggggattgatgtaagatcatctgtttttcatgttgcaaagtaaggatgttttaaaacaaggtagctgggcgcagtggctcatacccgtaaccccagcactttgggaggccaaggcaggtggatcatctgaggtcaggaattgagaccaacctggccatcatggtgaaaccccatctctactaaaattacaaaattagctgggcgtggtggcgattgcctataatcgtagctactcaggaggctgaggcaggagaatcacttgaacctgggaggcggaggttgcagtgagctgagatcgtgccactgcactccagcctggatgaaagagcaaaactctgtttcaaaaaaaaaaaaacttacaaagtaattatttctaccaccattattcttttattcatttgtcatttaaaatcttgtttttatgaattttatgatttgagagaattttcatgtcaaaatatcctttcttttctgaaagaatattttagcattaaatattagaaggaatacaatttcagtagttatgtgatgaataaatttagctttctgaaaacagaccgcacttgctttgttttttccatttggcaatgaacctgtgcactagcatttaggaatcatttaggaattatcagtgtagtggaaacagccttgctttgaaacaacacaattttacttccagttctgaatcatttaatttttctgaacttctttttacccatctgcaaaagaggaatctcagaggtatagcaataaggtttataaagggtttaagacagttctgaatgcgcaggagtttatagatggtaacgtcttttctctggatcattaattctccttactactctgtgattttaaaaacttagaatgttggctagtgtggtggctcatgccagtaatcccagcactttgggaggctgaggtgggagggtcacttgaggtcaggagttcaagaccagcctggccaacgtggtgaatccctgtctctactaagacacaaaaaaattagtctataatcccagctacttgggaggctgaggcaggaggatcgcttgaactcgggaggtggaggttgcagtgagctgagatcatgccactgcactcgagcctctgtgacagaacaagactctgtctcaaaaacaaaaacaaaaacaaacttagaatgttggccagtgtggtggctcatgcctataatcccagtgctctaggaggcagaatgctctagagggtggaagcgggaggattgcttgaggtcaggagtttgaaaccagcctaggcaaggtagtgagacctctgtctctaaacaacaacaacaaaacagctgggcgtggtggtgcacacctgtcgtcccagctacttgggaggctgaggtgggaggatcagttgaggccgggagttcaagatcagcctgggcaacatagtgagaccctgtctctaccaaaaaaaaaaaaattagacatatgcagtggcatgtgtctgtagtcccagctgctcaggaggctgaggtgggaggatcccttgggcccaggaaggttgcagtgagaaatgatcacaccactgcactccagcctgtgtgacaaagcaagaccccatctcttaaaaacaaaaccaaaccacacaacaacttggaatgttgaaagaagttcattatgtgtttccattttatgatgaactatttctttaatttttactctttttagttactgtttcttttttttttttttgcgatggaatattgctctgtcgcccaggccggagtgcagtggcgtgatcttggctcactgcaagctccacctcccgggttcaagcgattctcatgcttcagcctcccgagtagctgggactataggcgcccaccaccacacccagctaatttttgtatttttagtagagacgggatttcaccatgttgaccaggctggtctcaaactcctgaccttaagtgatccatccgcctcagcatcccaaagtgctgggattacagagtgagccaccgcacctggcctcatgtcttgtcttacctacggctttccccctctttctgcgttttctccaccctttaccgctgagtcagcctctgtataccattattcatgatgggaactcagcttgtctgacagttggttttaaggcacaattagaaaatattccttgatagtacaatgagtttgcagtttttaagttgtggttttggccagagatattaataagggtttggacgttgagtggaatactaagaataagaaaggggatgtgcttaaaatacatctcatgtgccttctgtttaattacacggtaatttgtaaaagagactggtttctgtggccttgaatactaatatagactttccctcaccacagcttatcttcgagtcataaacacagaggcatgcatagttcacacatctccatgtattttctgtttccaaggaagatatgatcactctgaagaaccaaaagatgagtcactctgaaaacttttcttcctttgtcttaatgtcatgactgtcttaacaattgactgtgtttatttcagcaacatttatctttagtctcttctctttggctcagtcagatgttttcagtttcacccagcacggaccacagccatattacctcctatatcccagtggataacttctgcaggaaaacttcagctacttgacactcttgggaaacgagctgggtgttcctgataagaaaggtttaccagaatcttgtaaagatggtttctctaataatagctaacatatttataagcgtgctatgttttagaacatgggtgtccaaacttttggcttccttgggccacattggaagaattgtcttggaccacatataaaatacactaacactggccgggtgcggtggctcacgcctgtaatcccagcactttgggaggccaaggcaggtggatcacgaggtcaggagatggagaccatcctggctaacacggtgaaaccccgtctctactaaaaatacaaaaattagccgggcgtggtggtgggcacctgtagtcccagctactcgggaggctgaggcaggagaatggcgtgaacctgggaggtggagcttgcagtgagccgagcttgcagtgagccgagattgcaccactgcactccagcatgagcgagagagtgagactccgtctcaaaataaataaatacataaataaataataaaataaaataaaactaatgataactgatgagctaaaataaataaataaaggtccgtgtataatttttgtgatatctgccaccacagataagccaaaaagtcctcttattcaaagggttggacatggctgtttcagtaacttcattacaggctttgtgaacattatctcatgtaatcctaaaacaaaacaaaacagaacaaaatgactttccctgtctcgatttcctgagtgatctttgtaaacatcagctattacagtgtgctcttttgtgtagatttcaggtgtatgtgactcttgtaagcattcagcttaccactgtttattgagtgattattatgtgccagatacagctctggacacaggtgtgactaaaacaaactccctgccctcaaggtgcttatattctggaggtgggaggaggaccctgacaacagcatggaaatatacaaatataatataatgtcaggtagccacaaatatagcaggatatagggacagcgagtgggggtggggagagtggtggcggaagacccttgaggaggcgacagttgagcagagacctggatgaatcgtgggagcaaggcttgtagatatttggcaaaagagccatttgattgtgacttacgtggttctccctcttctgctttctatagttttcctgtctcctggcagtcagtgccaggaaagaatttagttgggccagaccaagggaagccagacctagaaaggaggcaaagctacaggtgcagagcagagattgctaaggtcttagccgcgggctgcgggagcgagcctgggcgggcgggtaaggctgtggaaccggagtctggagagtctgctggctgcgcacaaacacggctgtgcttctgggcagatgaatggagggcaagccagccccgggcagaagatagaacagagaggaagctggggagccgggtgcagtaactcgaaatcccagcactttaggaggccgaggagggcggatcccttgaggctaggaattccagagcagcctgggcaacatagggagagtctgggtgtggtggcctgcgcctgtaaacccagctactcgggaggctgaggcagaaggatcgcttgagcataggagtttgaggctgcagtgagctatgattgtgccactgtgctacagcctggatagtagagtgagactccatctctaaaaaatagaaataagaaaaagaggaagccaggtgcaggctcaggaggctgacgcaggaggatcacttgaacccaggaggctgacgcaggaggatcactggaacccagcagtctgagactagcgtgcaaggatcacccctgtgaatagccactgcactctagcctgggtgacatagcgagactctgtctcctcctccccataataataataataataataaagaggaatctggtgctggcatagaggtacaggctggatgggagggtggtcaggatggggcaaggggccgagaccacaaatggtcctgctcctggggcttagaacgggacctggttctccagggaggtgaagaggagcaaggccagagctcagcagcagaagctgtggtttaagagagaggcttgattatagatgttaggaagtcaagagcccagtgcctagaacctgggctgcagacggggaatgaggcttatggctccgtaatggtgatgtaatgctgacacctcagctgtggcaccacagagtcctgtgttacccctccctgtgcccacacaagattaccagaaactactttgcatcccattgaatgcaatctgctctgtgcctcttttgtaaaatctgcccatttacacatggtgttgccaccccagcctgggaactgagcagcaagaggaagcctcccacccgccccactcccaagtagcgtttccttttccggctcccacaggcccattacataacctttcttagggccctctgcacagagctgtaatctttggtagaggggcaggctgtgctttagaagcccggagctcaggctgggcgcggtggctcacacctgtaatcccagcactttgggaggccgaggcaggtggatctcttgaggccaggagttcaagaccagcctggccaacatggcaaaaccccgtctgtactaaaaatacaaaaaaatttgccaggtgtggtggtgcatgcctgtgatcccagctactcaggaggctgaggtgggaggattgcttgagcccaggaggtggaggttgcagtgagctgttgcaacagggaacaacagagtgagactctgcctcaaaaaaaaaaaaaaaataaaaaaataaaaggccaggctaggtggctcacgcctgtaatcccaacactttgggaggctgaggtgggtggatcgcctgaggtcaggagttcgagaccagcctggccaacatggagaaaccccgtctatactaaaaatacaaaaattagctgggcatggtggcgggcacctgtagtcccagctactcaggaggctgaggcaggagaatgacgtgaacccgggagatggagcttgcagtgagctgagatcacgccactgcactccagcctgggtgacagagcgagactccatctcaaaaaaaaaaaaaaaaaaaaaagaagcccagagctcaagatctggtcagactccctggtttgaaccttggctcctcttgggcaaattacgcaacctcagttacttcatctgtaaaacggaaattataatagtacttacctctgcaggattcttgtgaagataaaagccacagaacagtggctgggccccagaagtgttagtgcttttgacgtttctgtaaccttcactaaacgtgacaccctccggggccattgtaggcatttttgtaccctcagtgtctaacatgttacccagcaggcacatggattcattcaacaagtatttattgaatgccttcttccaggccctgggatgcagggacatagccaccaatgagacaaactcctgcccccatggggctgacattgtgctgggggagacagactgtaagcaagtgaacaaggacacaaataatacagtttcaggccaggtgcggtggcctacacctgtaatctcagcactttggtaggccaaggtgggcagatcacgaggtcaggagttcgagatcagcttgaccaacatggtgaaaccccatctctactaaaaataccaaaattaggcaggtgtggtggtgcacatctgtaatcccagctactcaggaggctgaggcaggagaatcgcttgaacctgggaggaggaggttgcagtgggccgagatcatgccactgtactccagcctggacaacagagcgggactttgtctaccaccgcaccctccccgccaagaagaacaatttcagctagtgataagtggtataaaaaaataagttggggtcctgtaatcgagtgacctaagatgtgtgagatacatggttggtggtttttttgtttgttcctttgttttactttttatttttttgagatacaatcttgctgctctgttgccccaggctgcagtgttgtggtgtgatcatagctcactgcagcctccaattcctgggctcaagggatcctcctgcttcagcctcccaagtagctgggactacagatgtgtgccaccacacccagccacccagctaatttttaaattttttgtagagacagggtctcactttcttgcccaggctggtcttaaattcctggcctcaaaggatcctcctgcctcagctgcctcccagagtgttgggattacaggcctgagccaccgtgtctggctgggggtgctattttaaaaagaatggacagaaaatttctgcgaggatttgacgtttgaacaatggtcttatctaagcgacaatctgagagacagctgtccagacacagggagcagcaagtactagcatggcctctttgtgtttgagccaggagaggaataaaggtgagggtgagggaggcaagaggtaagcagaaggtagggaggccagggaggggaaggagggtgatggaacgaacgtaccggacagggcgtggaaagcgttcggggcctggctgggagtttgggatatgtcctttttgcaatgggagccactgagagttctaaaaccagaagtgacataatctgattcatgtttcttggctgtgtgcagagctttgcaagaatggcaacagggataaaagtcctgagaccagggaaaacccaagggtcttggatttgtgtggatggctgaggtaaaggagactcattccatggccttttctggaaagctgggtcatctgttaccagttttattgattgtcttctgtagcaggttgaatagtgtcccctcaaaatctgtgtctgcctggaacctcagaatctgattgtatttgaaaataggggtgttttttttttttttttttttttttttttgagacaggatctcactctgcttgcccaggctggagtacagtggtgcgatcacagttcactgcagccttgacttcccaggctcaggtgatcctcccacctcagcctcccgagtaactaagactacaggcttgcaccaccatggctggctaatttttgcatttttagtggagacagggtttcgccatgttgcccagactggtctcaaactcctagactcaagtaatccacctgcctcggcctcctaaagtgctgggattacaggtgtgagccactgcacctagccggcagtagggtttttgcagatgtaattagtgaagggcctcaagatgaaataatcccgaaattagagtgggacctgtatccaatgactgatgtccttataggaaggggagcggacatagagagacacagggagaagatagccccttgaacatggaggcagaagttggggtgttgcagccacgagccagggaacgcctggggccaccagaagctggaagaggcaaggacagatttcctccagagcatggccctgctgataccttgattttgggcttctaccctgcagaactgcgggagaacacatttctgttgctttaggcacttggtgatactgtgtttctgcagccctaggaaactaatgcacctcctaagcatcactggtttcttaggaatatttgcattggggtgcaggcatgagagaggcctcatcaggaagactggccattctatagaccttccttaagccctggagaggtgggtggtcttaccaggaactcaaaggagctctaagatcccagaggaggtccctgagaacgaatgaacaaatgaatgaatgaaagggcccaaggccgagtgcggaggctcgggcctgtaatcccagcactttgggaggccgaggcgggcggatcacttgaggtcaggagttggagaccagcctggctagcatggcgaaaccccatctctactaaaaattacaaaatttagctgggcgtggtggcacacatctgtaatcccagctgctggggaggccaaggcagagaattgcctgaacctgggaggcggaggttgcagtgagcggagatctcgacactgcactccatcctgggcggcagagcgagactctgtctcaaaaaaagaaaaaaagaaaaaaaaagaagagaaaagaaaaaagaaaaacaaagatcctaagacagggctgtgtctgaccttcaggtcactcaatagccctagccatgaacgttgtaattgaccctctgcagcacatagacctctagtcagtgcagccaccatcattccgctgtgtgccttctaagctgttctgggttgtaagatctttgttagaatttggataaagagaacagagttctaagtgactttttttttttttttttttctgagacagagtctcgctctatcgcccaggctggagtgcagtggtgtgatctccgctactgcaacctctgcctcctgggttcaagagattctcctgcctcagcctccccagtagctgggattacaggcacctgtcaccatgcctggctaatttttgtatttttagtacagacagggtttcaccatgttggccaagctggtcttgaactcctggcctcaagtaatctgcctgcctcggcctcctaaagtgttgggattacaggcgtgagccaccgtgcccagctgggcctaagtgactttctaatgcacagaatgtgtgaattttagaatatgatcttttaccatccagttttctggactcagaagtaacttttccttcctctcttttaaatgttcattaggtcaaattagaactgaagaagcaaccctgaggtataatactctgccccagcaacaaaaagcagtactgctgctgacttacggctactattctgagttgaaagtgctgaaaagaaaactccaggccatgcgcatttaatttgattgtaatcctgccagagatccacctgctttgctcccatccgtttcccttggcctgtcctgtagaaagggactgcaattgagcacttttttaaattaaaaaaatgacctgcactctccacaaaatacaggtccaaatggcagtagcttattggtcatcagtttctcctaggaaacctgggccacaagtttctggttggtttcggacacacagtaggtgctgaattaattaaaggtgtttctttaattcagcccagaagcatctgatttgcttaggaaattgattaggcatatattacctggatgatgtcaatttctatgtaaccatttctctcctgtgtaattgatgagcctcctaatgttgattttattttattttaccaagcactgtatttagttaataaaaaatacagaataggattcaaaacagctgtgtttgctattggcatggccgtcaccctcctaatacctgtgcatgtcataatagactacatttgcagaaacaaaaggttaggaataaaaagatgacttttgtccctccagctgccagtgacaacccacagcctcagcttatggtatttatttaatcttgtatctgtgatagggctctgagacacttctgtgaagcagatgtttgaagatctgacaattatggaagaaaatttctcatagaaaaagatatgttctccagccttgggcgggggcctgacattactcttccacatttcactcattcatttattgaaaaatgaaaaattatatatatttataatataccaggtgatattttgatatgtgaatacattgttgaattattatgttaagctaattaacatatctctcaccttacatacttattttttgttgatgagatggacatttcttttttaagtatgcttaaatgtgttcacggattgtgtgaaatttttggcatcccgtttcttgatataccaccttttgccacatttcttgtttatatagtatgtatctcagccggtgatgaatcaaggaaaaagataaagaaaaacaaacaaacaaacaaaaaagcaaacaaacaagttaaaacaaacccaaaaccttctttcccagtaggcagtaatttgggatgtaaaatgtatgaggtaggcaggaggaagatgaaaagtctgtctgaaatgagaactgtctgttggcttaattcaggtgatcacagattgtctgtagccttgagcaaagcctagagaatagtgaggctagtaaaacactagcccttgggctcaaaatttaagatggcaccaaaaaactaaaaatcagggtaaataatattttgatgcaatatttttaaaaaataaaaattaatgcacaatactctacaatgaacaaaatatcaaaatgctaaagacaggctctaaccccgcactggcaaacgcaacctcacttgtctccttctaatcctggccttgacccctaataacaaaaagtaagatcatctagacctcaaaaggaaaagttgctagtccctctaagccttcgtttgctctgggtttgaatccaaactctgttatgaccaacttagtgaaatcaggcaaattactcaacctctgtaacttccttttgaaaaatggagatgttttctcttgcaagactttttatttatttatttatttatttatttatttatttatttatttatttatttgagacagggtctcactccattgcccaggctggagtgcagtggtgccatcatggctcactgcagtctctacctctccaagcttgggtaatcctcccaccttagtctcccaagtagctgggactacaggcatgcaccgtcatgcctggctgattttttttttgaaaaaaaattttttttatagggataggggtcttgccatgttacccaggctggtctcttaactcctgggctcaagaaatctgcccacctcagcctcccaaagtgctaggattacagacgtgagccatcacgcctaacctcttgcaggacttttggggtggtttaaaaattacgcctgtgtagcactgggaacattatgacacccaataaataccaaataaacaacagctttaaatattataattcataatgattcacagagtattaagatccccaggcgatgcaaccaggtagtacctaagtgtatcagtcttgggtgcatctgtcagggttaacctggctttgtttttaactttacaggacatatcagagtatagctattgtgcctgtgctttgaacactcaaacatccgctcaactgctaagtaactgatttcctgtttagtcacagctccttgtctgggaccagccactggcagcaaattgtcatcttctgtatctccctctcaaagcaactcagccttctgaagacgtgtagaagttaggtctcgcaggcttgtatttattaagcccccccccgccacccatcagtccccagttattttgagtgtctcaaacgcatttcccacacctgatgattcatctgaggacgactcacccttgttgtcactgacactgtccacagcccagagctcagcctctgatttgctcggcagagatggggctatgtacatatcgtgtgagacggaagctaacataagcagaggagaaatcacggaagcaaagtgaagtgggaatccagttaatacttggaacagaaaactggaaagcagctcattcattctctccgattgtaaaaggcggatggaaacaacacttttgtcagcctttcttctaatccgatcacagctgtaaagaccataaagccaagccccgacgtcaattattcttctccctgttcctaagaatgtgaaattagatggggaaaagtgacagaagagtgtcactaaaataacttattacactttgagggtcttagtcgtcattaatagttgttactttttgaatattcatcagtgcgccctgctgttcggcaagagaggctgtatgaagtaggaactgcacacgcctggcttcagtcatgtatgccttggatttaagctcttcttttccacttaattagttaacaggaacttactgagctgggtgcaaaatgatacagaagaataggagaatgggattgtaacccctgaagcgtttgtgatttagttgagtagaataaactctgctgagcccaagctgagcctcagcctcatgcacctgctgtatttccacattctttcatttctgccccagaaatgttgcttgaatctggtttctcctctttaaccatctaaacttttactattgctttaggactgcctctcctcatttattgctatgttgattgcactgccctgccaaaccatattggagctggatcaggggaaaataagcatatatatatatatatatatatatatatatatatatatatatatgcatgaaaatatcctcccatattgtggaccaagtggaaaagttaatgaagctctacaatgaaaaaaaaagttgactatgagtaaagtctcatgttgtccaatctgtaatcctattattgtcaaccctcgtaagcccgcccagtggatgaggtggtgggagatgacgagggtgggatgggcattctgcagccagtggggaagaaggcagggccctaaaacaaacaagaacaagcatatctttatttagaatttggatgtattttcatcgtgaatttcctttgcattcattttgattaaaaaaaaatgcattatggctgggcgtggtggctcacgcctgtaatcccagcatattgggaggctgaggcaagtggatcacttgagcccaggagtttgagaccagcctggccaacgtggcaaaaccctgtctctaccaaaaatacaaaaatatatatatatattagctaggcatggtggtgtgcacctgtagtcccagctactttggaggatgaggcaggagaattgcttgaaccaggagacgaagggttgcagtgagctgggattgcatcactgcactacagcctgggcaacagagcaagactctgtcccagaaaaactaaaaaaaatgcattaaaataatatttatctgtattgctgaggtttgaggcaccctcttaaattttacacctaggcaatacctccagctctcacactaatccaggctctggtctattacaaaagtccccgcgggctctgacctacacagctgccagttaccttcctaacagacgaccagtgatcatgtcactttcttgttaatccagactgctgggagcgaaaattcagccccctcggtttggcgttgaagcccctttacaatctggcccccacctaacccaccagggcgcctgccctgtctggccctgttcccacctctcttgcctcatcaaacttctgccagactgcacctttgtccatgctctgctgtctgcctgaattgtgcccctgtctcctgaattgtgtctccaagccccttcacctaaaatattcctgttagctctcaagtttcacctcagatatccctgactggctgggcagacttcttagactctcgcaagcaggcttctttgttctgttttcccataggaaattgttcgtttccactcaattcatatcttggtggttgcattcatttttcgactgtgatttatctgtttaccggtgtccctagttccactgccagctccttgaggcgagcaaccggggcttttcatgtctaatgaataaatgaatacaatttgacacagtgaaaaaggcaggaacagcaaccataaaaaatccatgaaaaacaaaagcacagaggacaataggcagagaggacactggtcttttttttttttttttttgagggggaattctcactcttttgaccaggctggagtgaagtggtgtgatcttggctcactgcaacctctgcccccagggttcaagcgattctcctgcctcagcctcctgagtagttggaattacaggcgtctgccaccacgcctggctaatttttgtatttctagtagagacggggttttgccatgttggccaggctggtctcgaactcctgacctcaggtgatctgcctgcctcagcctcccaaagtgctgggattacaggcgtgagtcactgcgcccggccgacactggtcttaaaatcaggagaacctggatttggcttttggtcttgtcattagccagctttacaactctgtcattattttcagattttttactatggaaactttaaaattgtagcaaaaatagaacagcctgatgaacccacatgtacccatcatccaactagaacaatgtgggttcatcaggtttcttgtcatactgccccgctctgctacccccatccctggattgtttggaagcaaatcctagaccttactgtcacttcacatataattattaaaggaagaacatgaacattgtaattgattgcaaactcaccatgaacctggtggaaagaagagatcacaataggccgagatcacggggaagctcttggaagcaagttatgaaggaggaatacggattttggcagagaaagtctgtaagtaggaagctgtaaatcatgtgtccaacatgtggtgagcagattgttttatctggagtggggactgggtggcggaggggggtgagcagaggaaaatctaggcctgggacagagaggcagcctttgggcaatgggacagactggagactcttttagttttatgtaatgcaagggctaaggaaaaaactttgcctttgtcccctgaaggtttgctgaaaaatcaactgacaaaaagcagattaatagaagagaaggctggccaggcgcggtggcccacgcctgtaatcccagcactttgggaagttgaggcaggaggatcgcccaaggtcaggagttcgagatcagcctggccaacatggtgaaaccctgtctctactaaaaatacaaaaattagccgagcgtggtggcatgtgcctgtaatcccagctactcgggaggctgaggcaggagaatctcttgaacccaggaggcggaggttgcagtgagccaagatcgcaccactgcactccagcctgggcgacagagcgagactcggtctcaaaaaaaaagaaggcaaggtatataagtgtattagtgtgcgctgtgggaggagggaggaacacagagtgattacccatatcctagtggggtacagatgtttatatgtcttgttttttttaggggaaaaggagatggggaagtgtggatgattttagggaggtaacagatgatttttaggggaattcaatgagcttgaagaacatacaatggcttgggacaaagtctgtttgggcagacaatggtttgtgacaaaaatctttccaggtgtgttgaccgacttcagtgttttgccctgtgatatgggttcagttaatgaaaactcagggagggaatggatcagaggtgattgttttcttttttgccaggtctagacgttaggcagataagggaactccagagaataacttttattctgtgttttgggaggacagaaatgatgggaaagggaggaagatcagagatacattgaggcttcttcctcaattcagcatgtcaaagcgccatattttgggataccgctttctgagccccaacagtaactaggtattattttgaagggttgcattcacacttgtgacatggagtaaaggccagtggtaatatttctgtagagcgctttagttctgtctctcaatgtactttccttgttaactaatttctcctttagtagcaaaaggaattgtgacaggtgcatttaaagaaactgttacctgcaccaactaccaggcattcgttagttggggagaaatgagaactcatgttttccatactcagccctaccccaagatgacctggcaactgtacattttatcccactgggtttaatccttattatgaataacagagcgaaactttgttattcatgggagtggatttctcctgctgagagaattagcggcaatctcattcaggaagctgccttctgatgcaatgaggtcttttgaactgtgcataaatagaggccattctttaggcatttggagcatagggcttaaattgctccagaagttccaatcagactctaggtatctttggctgttttttttgtattttttttggttttttttgagacagaatctcactctgtcgcccaggctggagtgcagtggcacaatctcggctcactgcaacctctgcctcccgggttcaggcaattctcctgcctcagcctcccaagtagctgggattacaggcgtgcgccaccatgcccagctaatttttgtatttttggtacagacggggtttcaccatgttggccaggatggtctcgatctcttgacttcatgatccacccgcctcggcctcccaaagtgctaggattacaggcgtgagccaccacacccagccttctttgactgattcttctctgtgtgcgcatgtcctgaggtcacaagtggtagtgtgctccgtattggtttcttgacctgcctcttcaggactttctaaaattaaggtacaaccgattcttttgctgcagtcctttctgcctaaagaaggaagaaattcttctgttttcagaaaaaaaaaaaggaaaataaaagaatatgccagcttcaccaggataacccacagacattgagcattaggagtatggtacaaaaataatttctttcctcattaaggtttttttttttttaatttatgctacgagaaatagaacagagtgagcctattgttgtcttgccatcccagaatctcttaggaggacaaagagagatactttagtgtttgtaaagggagggttgactatttgtgcaggtttcaaaactcctgcaccccaagtccccagcagaataagcctctctgggtccattgaatggtgggtttttgaatggtggatctggggccttgtatggcagatgcacctgacagccataaccgaagcacatcctaagaatgaccctaaggttggccaggcgtggtggctcacgcctgtaatcccagcactttgggaggccgaggtgggtggattacttgaggtcaggactttgagaccagcttgggcaacatggtgaaaccccatctctactaaaaatacaaaaattagccaagtatggtggcgggcacctgtaatcgcagctactggggaggctgaggcaggagaatcgcttgaacccaggaggtggaggttgcagtaagccaagattgtgccactgcactccagcctgggccatagagtgagactctgtctcaaaaaaaaaaaaaaaaaaaaaaaaaaagaatgaccctaggatctaagaagaatgtgtgtttggacttccaagctaaggaatcggagagtggccaacctggagattcactccttatctatgacagacatccgaacccctagctcgttccttggaatgcaggccacctaggggatggaggccctttgctttgggttaaatggaggttgctaggtgggagggtgctaagtgaaaaacacaatataaactgcatgcttagtacaaacagcagtggttctcctgtccagcctgctgcccctggaatgccccttatgtaagtcctcaataaaccctgtctccctcactagctccgggtctctctctcttttttaatggagtctcccaggctggagtgcagtggtacaattatagctgactacaggcatgtaccaccacgcccagataattttaaaatttttttgtagaggcaggggtctcaccatcttgcccaggctgttctcaaactcctgggcccaagtgatcctcccacctcagactcccaaagtgctgggatttcaggcctgagccaccacgcccatcctgggtctcttttttggtgcctcggacatggtgccatccctgcttggagtcagcagaggtcttacgcgacagtccttggaatggtggaagcctgttttgttgtctttgatactatgaagggacaaacccctgctttgaaggtgtttatttcctgaaatttttacctgggatcccagctatctctttctttctttctttctctctctgtctctgggatcccagctatctctttctttctttctttctctctctgtctctctctttctttctccttccttccttccttctttctttctttcagatggggtcttgctctgtcgcccaggctggagtgcagtggtgcgatctcagcttactgcaacctccacctcccaggttccagcgattctcctgcttcagcctccggagtagctgggattaaaggcgcacaccaccacaccaggctaatgttggtatttttagtagagacaggggtttctccatgctggtcaggctggtgtcgaacttctgacctcaggtgatccgcccgccttggcctcccaaagtgctgggattacaggcatgagccactgcgcccggctgcatgacttttctataaagccttattttaaatgattttgggggcttaatttaggtgttttcatttgcttttggtcacagtctttatgtgtcactgagtgtgtggatgtgggggttcttctacccagaggaaagtgatttgatcacctggaaccaggtgctctgagaactggggcagcttccctgacttgcaggagagggtgcagagacttcttcgctggcatgtagctgcagcctagaaaaccgcttggtggtcctcgttcatgaacctgccgttgggggtgcttcatgctttatcttggtctctaccttgattaatctcacctccgtttctccgctccactggaccattctctagaacccctctagaaccactggaccattctcttctgtcagagtccagtgcttccagtctttcctgtgggctcttatcttctggtgcaaagttctttctcaccttccacagtcaaaatcaccatacttacctaggccatacttactaggctggagaggcaggtacatcaatctttcttgtttatttgtttgtttgtttgagatggggtcttgctctgtcacccaggctggagtgcagtggcacgatctcctccgcctcccgggttcaagtggttctcctgcctcagcctccccagtagctgggataacagttgcatgcaaccatgcctggctaatttttgtatttttaatagagacggggttttgccatgttggccgaactgctctcgaactcctgacctcaggcaatcctcccgcctcggcctcccaaaatgctgggattataggcatgagccagcatgctcagccaggtacattgatcttctaagtatttattgttctgctccttattcagtgctaacatttttattttcttattctttttccctgtcacttgaagatcgtcacccaagcaataaatccatttggttgtacttatttaattttctctgactttctaaggagtgacacagcaaagtgccttatcttgcatttctttccttttccgtgttctagttggaaaggctcagagtttgggagaagttaaacgtgactcagagaattgcttttgatggtggtgccgatacacacatcttttgaagcttagattgggtattgtcaatttaatttggagtctatcagcctgtagtgttctaatcacctattttgaagccttgctgacgacccgagattccttgttaaactgccactggaataagcataacacttttcattaaaggaaaaagaaaatgttacttaaagtaataggcacacccttttattttcttgacagatagcaaagaaaaaaatcttctgtctttaccttgacaagacatgtaccattgctgggaggttttgcttgtatgagaacttcaacgttagaatctagacatctcggagaattgaaactcaacaagtttctctgttttggggtggagaaaaaggacaaaaagttgtcatatacagctagctgtccaaacagtcaaatacgaaagctaatttatcttttaaaaggttaattctttgatgcctctatcacagttagtgttaaaatgaaagcattggaaacaaactctttttctgttagctcagattttaaaaaaattctttttgcagagatgggggtctcactatgttgctcaggctggtcttgaactcttggcctcaagcgatccttctgccttggcctcccaaaatgttggaattacaggggtgagccactgagccagattttgaatattttaattacttaactgcttgtctgtctggcaatgagataagcgcagtagccagtgattaccaacagttaaacagaagaacaagtcacataaacaacacttatacttcctgtaaacccaattaaaaccacatttcaggtttgctcttatgatttagaagtaaatttagaatcagtttcatgaatcttgcagtatttttcaaattaatgtctttaggcatttggacaatgggctgtgtgaatgcaaactgcgttttcttcaattgctatcaattagagacagttaagaactcaactgatgaagaaatagccacctgaaagtgagcccacaggcaagtcacaggcccctcttcctcctgaaggtgcacgggagacttcgttaaaaaaaaaaaagctgtagtaaaatacgtataagataaaaatttaccattttaagtttcttttttttgaagacgaagccttgctctgtcacccaggctggagtgcagtggtgtgatcacaattcactgcagcctcaccctctccggctcaagcgatcctcccacctcagcctctcgagtagctgggactacaggcgcacaccaccgtgcccactaatttgttgtagttttagtagagacgagattttcgctgtgttgcccaggctggtctcaaattcctgggctcaagtgatccacccgcatcagactcccagagtgctgggaaggtgtgagccaccatgctcggcccattttaagcattgtaaattgtacaatttagtggcattaagtattttcacaatgctgggcaaccatcatcactgttcactttcagaactttttcatcattccaaatagaaattccacccattaaacactaactccccaatgtccccttcccccaccctctggtaacctttatcctatgttctgcctctatgaattggcctattctaggtacctcataaaagtagaatcaatattatgtgttcttctgtatctggcgtctttttcttagcatgttttcaaggttcagctgtagcccatatcagaatctaatttcttttcctttttttgagacagagtttcactcttgtcactcaggctggagtgcagtggcacgatcttggctcactgcaacttccgcctcctgggttcaagcaattctcctgcctcagcctcctgagtagctgggactacacgcgcgcgccatcacacccagctaatatttgtatttttagtagagacggggttttgccatgttgaccaggctggtctcgatctcctgacctcaggtgatccacccaccttggcctcccagactgctaagattacaggtgtgagccaccgtgcctggctaaaaattcttttttgcacatgataaactcacctatcttaagtgtaaaatgaataagtttcagtaaaacaacaaaagctcttaagttttagtaaatccatacatctgtgcagccatcaccgcagtccagttttagaactttccattcccccctaaacatcctccttgcctgtttgtggtcagttcttgctcttaccctgatccccggcaactagtgatgtgatttacgtctctatagttttgtcttttctagtaatttcgtataaaaattatacaacatgtagtcctttgagactgaccttttttttttttgttttgtttttttttgagacagagtctcgctctgtcgcccaggctggagtgcagtggcgcgatctcggctcactgcaatctccgcctcccgggttcatgccattctcctgcctcagcctccagggtagcgggcactacaggtgcccacatcacgcctggctaatttttgtatttttagtagagatggagtttcaccatgctagccaggatggtctcaatctcctgacctcgtgatccgcacacctcggcctcccaaagtgctgggattacaggcctgagccaccacgcctggccgagactggcttcttttactcaacataaagtttttgagttcattcgtgttgttgaatgcatcagtggttgggttttttttttgttgttgttttttgagatagggtctcactgtgatcacccaggctagagtgcaatcacagttcactgcagcctccacctcctgggctcaagtgatcctcccaacgtcatcctcctgagtagctgggactacaggcacatgccaccacacctggctaatttttgtatttttgttttgtatagacgggggtctcactatgtttcccaggctagtctcgaactcctgagctcaagcagtctgcctgcctcagcctcccaaagtgctgggactacaggcgggagccatcatgcctggccaatagctggttcttgttttactgctaatagcattccattatagggatgtaccacattttgtttattcatcaccagttgatagagatttgtttctaattcggggctactgtgaatattgctgctgtgatcatttgtatacaattcttggatggacatgtgctttcgttcctcttgggaagatactttaaggagtggaattgctggggtttttttttttttttgagatggagtctcactctgtcgccaggctggagtcactgcaacctcctcctcctgggttcaagtgattcacctgcctcagcctcccaagtagctgggactacaggcgtgcgccaccacgcccagctaatttttgtatttttagtagagacagggtttcaccatgttggccaggatggtcacgaactcctcatgatccacccacctcggcctcccaaagtgttgtgattacaggcgtgagccactgggcctggccactgggtcttatattaaacttatgtttaacttataaagaaattgccaggctgttttccaaagtagttcttgcatttttttactctcactagcaacatatgagcgttttgggtttgccacatccttgtcagtacttggtattatccgtcttttgtttgtagcgattctaatgagtgtgtggtggtatctcactgtggttttactttgcatttcctgtactcttttaaaactgctttccattatagaacatgttgtgttgtgctgttatatatataaagcttctgctcacctgtgagctactctgtctagctgattgatccagtattgtgtccgggggcagggtacatggaaaatgcttagggtttgttgagtgaatgagcaaactgatactttgtaggagtggccaattttcaaatattttaggtaacagaaaacagtggtgaatcaactcaaaagatgaggtaccagtcaaatctcttcccttttgtcagtttctaagtagtattaaacttgagtgaactaagttttacttttttttcctttgctttgcttaccccttggtgagaggtaatggagaaaatatagacagagcaggaggaggaaagaaactcaatctcgaaatgactaagagcttgtggagcagcttgggagagaaccagctgggttattggctactctgtagttccaggtgtggggaattattctcatcaataccgtgaccgcctgccactcccctctgccctctttctttgtgttaattagagcaggggtctgcaaacattttctgtaaagagagtaaacaaatatgtcaggctttgtgggccaagagaaaacatcagcgacgttgtggaggtgcttacataacgacagacaaaacaaatttccatgaatttttatcgatgaaactccaaacatagtaatggggtacgattttctgtaacacaagtctgctaatgagaagaattgaattatttgagggaggaaaacattttgcttaattggaagttcagagttaatgtttcctatcatcatggtagaaatgtggcctcattcttctacaaagcttctctgatatgcagtggtcttccctcctgagaattcaccagaatgtactggcttgatttgcccttgatttgttggggaacttttcacatgggggaagcacattaagagtacaggctcgggctgggcgtggtggctcacgtcggtaatcgccagcattttgggaggccaaggcgggcagatcgcctgaggtcaggagttggagaccaccctggccaacatggtgaaaccccgtctctactaaaaatacaaaaattacctgggcctggtggcgggcacctgtaatcccagctacttgggaggctgaggcaggagaatcgcttgaacacgggaggcagaggttgcagtgagccaagattgtgccactgcactatagcctgggacacagagcaagactccgttctcaaaaaaaaaaaaacaaaacccaaaagaggacaggctctagggtaagactctggggtctgaattccagctcaacaacttattaactatgtgatctttcactacttacataacccatctaaaagctttggtttcctgatctataaaatgaataatagtacctatttcacagagttgctgtatagattaaacacaaagatttagaatgacatattatactttttattcttcttttgattttttttcaaccatttaaaaatgtaaaaccattcttaagtcatgggcagtatgaaaacgggtggcagggcctgcaggatatagtttgtggaccctgcattggagtatgaacttgaattattgccgtttactttagaaacgatgattgcttttttcctaattgcaaagcaccatatgttcactgcagaaaacttggaaaacacaaaaaagcacaataaaacaaaagccattcagaatctccaccatccagagacgtttcatgagtagtatgttgccccatagccttccagacaattgtgtacataatacacatatttcattattttttattttcctttttttttttttttttgagtcagggtctcactgtgtcacccaggctggagtgcactggtgcaatcacagctcactgcagcctccacctccagggctcaagcaatcctcccacttcagccccctgagtagctgggactacagctgcatgccaccaggcctggctaatttttattattttttgtagagatggggtcttgctatgttgcccaggctggtcttgaactcctgagctcaagtgatcctcctgctttggctttccaaagtgctgggttaacaggtgtgagcctctgtacccagcctacacatatttcaaagtaaaacccaagcccatactatgcatactgctttgtatctttttcacctattaatatgcaatgcttgtcattaatattcttctataacctgaattttaatggccacatactattctgttatactgtgttaaaatttactaaagcaatttccaacaacattaatgctgttttgaatttttcaccattagactgaactcagcaataacctggtacatacatgcttatacacatctcttgattcattccttgggataaattacaaaatttaatcactgggtgacagggtatctacatttttatttatttatttattttgagacagactctcgctctggagtgcagtgatgcaatcccggctcactgcaacttccgactcctgggttcaagcgattctcctgcctcagcgccagagtagctgaggttacaggtgcgcaccaccatgcccagctagttttttttgtttttttttgttttttttgtatttttagtagagatggggtttcaccatgttggccagactggtctcgaactgctgacctcaagtgatccacctgcctcggccttccaaaatgctgggattacagacgtgagccaccgctcccagctgggtatctacatttttaaagctttggtgtatcttgcaaagttgtctcctaggaaagttgtatagttagtcattcccagatgatgtatggagcactgttgtttcaatgcccctcttatatttttacttggttactgggtttgtgaacttaaaaaattaaaacattcttattttaaaaacaattcaaatatataaaacatgtacagataataatgaaacgtacacttatgtacccagcagaaagattaaatcggtgttaacattttgctgtatttgcatttgttacttttaaaaaacacattccagattcaaaaacaagtctattattatcatcccattttacaagtgaggaaactggctcaaaaactttaagtaacttgtctaattcttaagaaccagtaagtgggctgtaaagaaccagttgatcctaatgatgcttttaccttaggcttttactgatattaatatagcccttccagtcttcttcccctttttggtcagtttctgtctggtacatgttttctaatgtctctacttttaagttttgtatgttgttgtattttagatgggcctcttgtaaatagcttatagctaaattaagaaaaaaatctcgagtctgggtttttaaaccagctattaataacctgttttttaaccagctatttcagtctgtttgcatttatagcaattgttgatgttttttgaattatttgtcttatttcatgctttctatttcccatactttttctgttttttctccatttcctgtctcctactgaattgagttttaccaggttttctctttttctctctactagctttgttatcctaaaaatattcaatgtgtatacttaaatagcagtcagaaattaccctatcacctcccccacccagtttttttcttatttagtgttttaatttctccttttttggtattttattgtattttgtattttattcactgttatttttgttgttttgtgcagcccaaactgtatatatttttatttactagggtctttactcgtctttctaagtactcttttatgtacacattttattttctgaaaatatatactttagtgcattttagtaagagcctgtgaatgtacttagttcttgtttaaaaacagcttctttgtcctcatctttcaatgactctcttttagcttagtatagaatctcccctcaaccctctgaagatagtatttctttgtcttctcaacttttcttttcctcatttgttttctcaacttctcaaccctcttttttcttatttatttggaaatggggtctcactatgttggccaggctggagtgcagtggccactactgatcagcacaggagttttgacttgggctatcacttcacccctccttaggcagcctggtggtcccctgatcctgggagatcaccatattgatgccaaacctagtgtggatacctgtttggaatagtgcactacagcccagacctcctgagctgaaacgatcctccctcctcagcctctgaagttgctgggactatagtctcgtgccgccaaaccctgctcagctctcatttgttactgagaagtcttctgtctgattgctcttcctttgtaggtaatctgccatatctctctggctgttttttgttttttgttttttgttttttgttttttgagacggagtctcgctcattcggcccatgctggagtgcagtggtgcaatcttggctcactgcaagctccgcctcccaggttcaagccattcttctgcctcagcctcccgtgtagctgggactacaggcgcctgccaccaggcccagctaattttttttgtatttttagtagagacggggtttcaccgtgttagccaggatggtcttgatctcctgacctcatgatccgcccgcctgggcctcctaaagtgctgcgattacaggcaggagccaccacgctggctatctggctgttctttaggcttcctctttgtctttgaaattctggagcctcagtcctgtgtgcatggattcatttttatttattctgcttagaacttggtattctttacacggagaattcatgacttttacaattctggtaagtccttaactattatcttttaaaatgttgcttctccttcactggggcagccataaaatcatgctgctcggttgtcttgctggaggaagcatagttgactgagccccagaggccatgtctcagattcactcacgcttctcctgggctgctcccagctgatggcagaatatgacaggggtaccagtgctggcccactgctgcaggaggtaggatcctttcatggatgacattggctcctggactccccatcagtgtgaccaaactttcttacatctgcgtctcactctgagtctcttcctacccagtactcctttcttctctctccatcatacctacaccatggtctgaaggctctccctgcctcctcctgcttcctcctctttttccttcacaggtgtttttcccaacatctcgtctcagcatctgcttcttggaggacccaaactaacaccgtatctctgttttcatcatctgaatcttgtattagatgcatatggaccttctcattgtgctctctatgcccttagttattcttttatgcctcattgacctctctaatgctctttgggtaatttcctcagatctgtcttccattttactgaattctctcttcatttctgtctaatctactatttaatctatctattgcattttaaaattataatatttatttctaaaagtaccatttggcttgttttcacatctgactcttacttttttcccagtatattcttctcagggttttagtttctcattttttgtctttaacagtctaaagcacacttacattgtactccctctttcaaattgtagttttatcattccaagttccctggagctctaataatcttgtttgttgtatttgctgttttctgcttatggtgtattctaatttttaattttcctctaaactaacctttagtgggggttattttttttccgtgggaatcttacatggtctgatagtgaggctccttcagaacaattagcattgctcagaacaatttgcattgcttcttctagagatctcaggagtgtcactgccttggggccaatatttctgttaatttcttagtttagaacggcctggatcaccccgcttaaggctcaggtttgggatatccatttttcaggggagaggtttttttcacttagaacccaagaacacaaaattgttctcctagacccctgtaccaggggatgatttttccccctagtctttcttttcactgggaagtatttctttgaagatcctaactctctttggggcttttttttttctttttctttttttttttttttttttttgagactgagttttgctcttgtcgcccaggctggagtgcaatggcttgatcttggctcactgcatcctccgcctgccaggttcaagcgattctcctgcctcagcctcccgagtagctgggattacaggtgtgggccaccacatccagctaattttgtatttttagtagagaaggggtttcaccatgttggccaggctggtcttgaactcctgacctcaggtgatccgccccgcctaggcctcccaaagtgttgggattacaggcgtgagccaccgtgcccagcctctttggggttttagttccaactctctgcttcatggtgactcatggtttcacctcctttgtccacttgggttttaaattgtaagtctggaagttactagaacaatcccagaattagctcacacactttcactctgtttttccctttcttcctggggttatattttacccagcattcctaggtgtttgtggtgggagattccgcccctacgttatcttaatttgttgccatatttctgaaccaggaatcccatttaccacattgagttctggacatcaaggttctccgggcatcactttctatgctgtgtcatcagtgaagcccataaacttacccgttatcagaaaagcgaagatttcgagatcttgttgagacggtaggtatatagtatgtcctgaggggtttagaaaaaatagctacctttatttccaacccatggtaacttcattggtaaatccagacagacctgtaagatttttacaaatggaaccagcagcttagaaaacaaaaaataataattactttatcatcacaagtattccttttactgcctcagcccagtaacagagctcttctatctctctcgtttctttctcccagctttcccaccatccttctcaatttgtcctttgtcaacagggcagaaaaggggttgaagtgatgtatgggtgtaatccactgtgcactgctgaaaagataaacttaaatgaagtgatttataacctgtggcaggtattctgcacccagaattgtttgtcaaagtgagtgctcattgattttccatgccttccgtgtcagcccctggattgccattgttccttagaggtggctaagcagtttaaggcatcagggtgttctcccagcgcgggcactcactccgctgcagggtttagccttcaactgtgttccagggctcggaactccctagttgaccccttgctgcaggaggcaggattctttcgtggatggcattagctcccagactccccatcagtgtgaccaaaattttcttgttttttttttttgaaacagagtctcactctgtcagccaggctggagagcagtggcccgatctcaggtcactgcaacctctgtctctcgggctcaagcaattctcctgcctcagcctcccgagtagctgggatgtgccaccacgcctggctaatttttgtatttttagtagagacagggtttcaccatgttggccaggctggtgtcaaactcctgacctcaggtgatccactcacctcggcctcccaaagtgttgggattacaggcatgagccaccgtgcccggccctttcttttttctttttctttctttcttttttttttttttttttttttgagacggagcctggctctgtcacccaggctggaatgcagcggcgcgacggtggctcactgcaacctccacctctcagattcaagtgattctcctgcctcagcctcagtagctgggattataggcgcgcgccaccatgcctggctaatttttatatttttagtagagatgaggtttcaccatgttggccaggctggtcttgaactcctgacctcaggtgatccacctgcctcagctcccagagtgctgggattgtacaggcgtgagccactgcgcccggccagtgtgaccaaaactttcttacagctgtgttgcactctgagtctcttcctacccggtactcctttcttttctctccatcatacctaggccatggtctgaaggttctccctgcctcctcctgcttcttctctgctaccatccacactcactgtgtccatgaaaagaccagattccactggtacttcagatttctcaaatgagaagtaaaacatattctataagttttgaaaatgcttctataaaatgcttctggaatcttcctactggaagtcaaatagataataggtccccatagaatagcacgggacaatagtacagcttcgggggcggtgcccagggaaatctgggctgagttagatgaaggatactaagcatcctatgggaactcatgcagcagggagtctccttcgcttaaggggaccacatacatatcacacaggatgtgtctttcttgtttttctccaaacccatcccgttgtgttggagggtgatgaagtttttccagcaaccacagtgcagtctggtgaatcagaatcagtgtcattgagcctcagcaacacccagatatccaagagattgtcttaaagaatcttagaactgtaggctgggtgtggtggctcacacctgtaattccaaaactttgggaggccaagaggatcgcttgagagcaggagttcaagaggatggcttgagggcagaagtctgaggctgcagtgagctgtgactgcaccattgcactccagcctgggtgactgagggagaccctgtctctaaacaaaaacaaaaacaaaaaacttagatttttggaccttagatcatttaatctagagttctaactcgataggcaaggaatctgaagcctggactatttgatgacttgctcagggtcacagaactatggagctccacagccagcattacgacctgggtttctggacttcctgctcatccctgtttctggaagggcttctgctccaggtctctctgggtaatgtcccatttgctttcacaacatgcctcttgaatctaaagaaagcagtgctgttggtggttgtcttagttgcagtttatttgcttggtcctttgaacaggaagagagttatgtttattatgggttgggaggaatgaacttgcctacacctttttttttttcttttcttttctttttctctttctttctttcttttttttttttttttttttttctgagacagggtcttgctctgtcgtccaggctggagtgcggtggtgggatctcagctcactacaacctctgcctcctgggttcaagcaattctcctgcttcagcctcctgagtagccaggattataggcgcccaccaccatgtccagctaattgttgtattttcattagaaatggggtttcactatgttggccaggctggtttcaaactcctgacctcaggtgatccatccacctcagcctcccaaagtgctaggaatacaggcgtgagccaccgtgcctggctgcactttttcttttttctgttgtgtgcctaagacatggttatctagacaaaaataccacttagtaggcactttaccaatacatatcatgctagaaaacagattgctttcatgcaaatgaggtggagctaggaaagttatttatgtaatgattatttcacaattggaatttttttttttttttttttttgagatggagtttcactcttgttgcccaggctggagtgcaatggcgtgatatcggctcaccgcaacctccgcctcctgggttcaagcgattctcctgcctcagcctcccaagtagctgggattacaggcatgggccgctacgcccggctaattttgtatttttagtagaggcggggtttctgcatgttggttaggttggtctcgaactcccgacgtcagttgatccacccacttcagcctcccaaagtgctaggattacaggcgtgagccgccgcccccggcaacaattggaaattttttaaaaacaaagactatttagcttgagctcaactaaagactttggtttgcatattatagacaaatacataaattgtgtttatatagactgtgtacatatataattatatactgatgagatatagcatttgtatttttcaaaccacaaacatcctgtagtaattcagacttataaatacttctgcatagcaagtaacaatttataatagctaaacaggaatgaatatggatggtgtttctttgtgcctctgattggtgggtaggggggattgaaagcttgattttgatcagtttttttttaaacttatgtgcattattgattaatcacttaattgaattggtgggatatattttcatacatgcagttgtggcaatattgattgagctttctctgagcccaaactaccaattcttacaagtgaaacaggatgtcatctccgtgttgtaatcattttatacttcacatagtacattggaagtctgaggtagcaaattcggcttccggaagtccttgacttggggtcaaagagcatcgctgatatcaggagaagctgcctgaatgtgaattcggtagtaaaaatggaaagatattttatgtgtttggctaggcgcagtgcctcacacctgtaatcccagcaccttgggaggctgaggtgggcagatagcttgagctcaggagtttgagactggcgctgtgggcaacatggcaaaaacctatctctacaaaaaaatacaaaaattagctgggcatggtggtgcacacctgtggttccggcggctacttgggaggctgaggtgggaggatcgtttaagcccgaaaggcagagcttgcagcaccactgcactccagtgtgagtgacagagtgagaccccatttcaaaaaagaaaaaaaaaagagccaggtgtggtggctcatgcctgtaaccccagcactttgggaggccaaggtgggcagatcacttgaggtcaagagttcgagaccagtctggccaacacagtgaaacctcatctgtactaaaaatacaaaattggccaggtacagtggctcgtgcctgtaatcccagctattctggaggctgaggcaggagaatcgcttgaacccgggaggcagaggttgcagtgagcagagatcacgccactgcactccagcctgggcgacagaacgagactccatctcaattaaaaaaaaaaaaatgatattttctgtgttcatctaagtagagaaataagtatagactgccttatgttcatttgcttcccagtgttccttggtggctggattattcatctaagtgagatgtaagatcttttgagcatctaacataatagttattcataaagacatttaggctgatggctttctcagaacgtcctgctgttcatgatggacttcatctatatttcaatgaatttctaaatggaggaaacagaacatttttcctttgattaattcattggttttcagtcctcaaggacccataggctggcgaactctaagaggaagtcacaaaaggaagaatggtaaattggaattggaactgtggaactcaccccgtaaaaatctttcaacactgtcctgagttcaacatctgaaatacagtggaccaggagaagattgatggaagctaatttaaaaagctaatttaaaattgcaccaaaaaaagcacagcgttatgaatttaataaagttcgtagggtgttttggaccacgattttacaactctctcactttttttttttttgagacagagtctcactctgtcacccaggctggagtgcagtggtgcaatctcctctcaccgcaatgtctgcctctcgggtccaagcaattctcctgtctcagcctcctgagtagctgggactacaggcatgcaccaccaggcctgattgatttttgaattttattagagatggggtttcactatgttggccaggcaggtctcaaactcctgacctcaggtgatccacccgccttggtctcccaaagtgctgggattacaggcgtgagccaccacacccggccacaactctcacttttaattgactgtgccccagaatcaagcactttggctagcaaatgatggctagttagatcacagaggtgtgtgttgcattctgtgtctgttcactgtgaaatcgggattttaagagtgtatgttgttgaacatacacctgtctttgagtgatcggtccccagaggccacctctaaggtgaagatttggggaggtaattgtgggaagccccaggaggagcagaggaaaatgagaaaggggacgaagggaatgtaatagaatgtgtgttgggagagggtttccttatgagccagtgcagaggaaagtcttgaaatgcactaaggaaatacagtctgtgccgtgatggtagcaccgatgtggaatcccataagcagctgcttgaaaaagacttggtggcagacataactctttttgccttttaagtgctccgggagatttcacatgccaatgttgaattgtccccaacttgggttcagggtgcccaggaactagcaaaatcagcttttttgtggtaggatcttcataggatccaggagctgtcacccacgaatgacagagcccctgcactggatagcctttctccaatctgtataaggtggaatagggaaatgaggctcctctctgatgttcggggctttagctgggctgggttctgagtcctctgtgcctagttccccttgggaagcactggagaccttgaactggaaattctcttcctgggatcaaccaaatactcccaaaacttcgtggaagcttagctccttgtgccttttgtcaggtttccctagaagtcaagggattctcatggagatgatgtatgggatgggggctagagggctgggaggatggtagggcgggggtaaatctaaacttcaggtgtcttgggagtccatgacttgcatcacagagctggtttcccccccgtcaggcaaggtcggcctttatttatttatttatttatttattttagagacagagtctccctctgtcacccaggctagagtgcagtggtgccatcatagttcactgcagccttgaacttctgggctccagcgatccccctaccttagcctcctgagtagctgggactacaggcacacgcccaaatgcataactaatttttaaagtttctgtagagatggtggggtgggggggtgggggggggcgcgtctcacgatgttgtccagtctggtctcaaactcctggcctcaattgatcctactgtcttgacctcccaaagcactggaatttacaggtgtgagccactgggctggccaaagtcagccttttgtacccctctcaatgtcagccattgattggttgtgggcctcccacaggtggagaggttcccatttgttcaaacgcaatttacaaacaagggggcagatgggacccattagtagctgaaactcacagcaaccagtgcctagtaaaggattcatgcagggccctcccacacgacccaaaacagcaaagagaaagggccaggtgttggcctttttctaactcatcccttttaacacagtaagttcagcagtcctctaagagtcccacttcaaagtacccctcttgccttccgaattcagtgttgttagcccttttgcttgaaaaacccccactcttggacacagaggaaataggagtcagatgtctgcaccttctgcacctgtggtttgaacaggaccctctgggagtcgcaggaggagtgcttggccctggtgcttggcaggaggttgggctgggagatgatgattgccttgatcctctctttcaactacttcattccaactgttggaatacctcagtagtgagtattaattttcttcccccccaaatccagcaagcaatctagctccttaagagaagactatgttcctgctattaacagggctttgactgtttttgcaaaataataactgggcattcttgtgttaaggaccatttgtttccttcacctgcttttcttcccaatttagctgaaaagggacctgagccagttaggagatttttttttttttttttttttttgagatgaatcttgctctgtcacccaggctggagtgcagtgacatgatctcggctcactctcaggttcaagtgattctcctgcctcagcctcccaagtagctgggattacaggtgtgcaccaccattcttggctattttttgtgtgtgtgtgtttttagtagagatggggtttcaccatgttggccaggctggtctcgaactcctgacctcaggtgatccacccgcctcagcctcccaatgtgttgggattacaggcatgagccactgtgccccgctggagactttttttttctgaactaaaatatcttttcagatacaaggttcagggagggtggtgtggaccagtgagagaagtttcatttgcacctttttcatttttattctgatccagagtgactggagtattaatggatgttgtcataggcttttgaagtggccttgcttggtgattgagtggctctcgcaaaattctgaattttggaaccaggtattgctttctagctatactaacatgtccctttaggagtctaatgagatctgctttgcctctgccccaaacagatttgctttacaagttactgtcactcagggcaagctccaagctctgtatctaaaaagcaaagccacctgccagccacaaccaggtgcatgttgcctttgggccttgtgtcaaaatatcttcatcatctaagaataaaacccccaaagaggtcagcctgatcttgtagaaagccgtccctgggaaaatgattaaatgtcagtaaacaagagcatttcagaaactgacatggtccctaatgtttgtgtttagagactcctaatgtgtcagaattgagttggagacttacgatgtaattgcatgtcttgtatttcatgccagcctctcggcttggtgctggggcagagtgggaagcagaccacagagcagagagggcctctgcccttttattgtcctgtgagagagatggatattcacaaataatcctgtccctaattaattgcagctgagataaccattataaaagaaactagagagtgtgacaaggggtgactatctcttggtcttggttgtcaggcaatgctatggaagggttatttagagtcgtagaagtgtctagtacaaccaccagctgatgaagatagtacaggaggaagcaggcatgtttgagacatggtgagtttcaggctcaattaaggagctggagatagctaccagctgttagcaacactgggggcgtgcaggagcagcatcagggacagatttgggagtcccttggggaagccgtggtgaagccacaggaatgaacaggtggctttctttcctttttttttttttttttttgagatggagtctcactctgccgcccaggctggagtgcagtggcatgatctcggctcactgcaagctctgcctcccaggttctggccattctcctgcctcagcctcccgagtagctgggactactggtgcccaccaccacgcccagctaaatttttttgtagttttagtagagacggggtttcaccgtgttagccaggagggtctcgatctcctgacctcgtgatccgcccacctcagcctcccaaagtgctgggattacaggtgtgaaccaccgtgcctggccgcttttttttttgagacggagtcttgttctgttgcccaggctggagtgcagtggcactatctcggctcactgcaacctctgcctcccaggttcaagcgattctcctgcctccacctcccaggttcaagcgattctcctgcctcagcctcccaagtagctgggatcacaggcacccaccaccacgcctggctaatttttgtatttttagtagagacgaggtttcgccatgttggccaggctggtctcaaactcctgacctcaggtgattcgcctgcctcggcctcccaaagtgttgcaattacaggagtcagccactgcgcctggcccaggtgactttcttgagagagtatggagagggatctgggagaatgtctggatgaaaccttctttaagggcctgtcacctacatgcaataaagaccatactaattgtaataagaccattgtttactttttgttccccaactggtgcaattttcccagtccctgtagtagccccaggatggctcagaaactgtctgggttcctgctgtagacactgtgagaacttcctttccaagtgtagccaagcacccgccccactgctgcagcctgtgccatcctcccccttctctgcacacattgcatatccctgtggtctccgttttgagctcagagtgtgggcctccaaccctcagcaccgtatcactccgtagcttattagaaatgcagaatctgcagcccccgcccagcttgctgaatcagcctctgtgttttaacaagatccccgggatctgtctgcctgttgacaagggagaagcctggtctcggttacctcctcctcagcgtcctgagcctggctggatcgccagcacactcagaccagcggccccaggctcttgtgacagcagccgtcagacccgtgggagttcaggtgcgggtcatcagggccctgctggctactccacctctctgggtccctcagctcagagattccacttgagtgtagagagaattgttcccctctgctctggtgccctctttgcactaatgtttagggacctagaaagggcatcaggaaataagacagaacaaaagccaccaagaggaagaaggaaattcaagtgccatagctatagagaggctcaggaggataaaaacaaagcaatagcaggggctgagagattttttaaaaatcagctttactgtgatatataatatatatatgtgtgtgtatatgtatatatataatttttttttgagacagaatcttgttttgtcatccaggctggagtgcagttgtgcaatctcagctcactgtaacctccgcctcctgggttcaagcgattctcctgcctcagcctcccaagtagccaggattataggcacacaccaccacacttggctaatttatgtatttttagtagagatggggtttcaccatgtcggccaggctgttttcaagctcctgacctcgagtgatctgcccactttggcctcccaaaatgctgggattacaggcatgagccaccacacctggccatattgtgatatagctaacatagaatagaactcactttaagtgtacagcttgatgagttttaacatatatatacacacactgtagtcatgtaaccactgccccatcaagatacagaacatttcatcacccctagaacttcccttgtgacttttagctgtcaattacttctctctaccccccacattccccactcctgttcctaacaagcactgatctgcttttgcactaaagtcttgcctttcttaaagtttcctatagatgcagtcatacagatgtagtctcttgtgtctcacttcttttgctcaacacaatgtttttgaaattcatccatattccccgtccgggagggaggtggggggggtcagcccccctgcccggccagccgccccgtccgggaggtgaggggcacctctgcccggccgcccctactgggaagtgaggagcccctctgcccggccaccaccccgtctgggaggtgtacccaacagctcattgagaacaggccaggatgacaatggcggctttgtggaatagaaaggcgggaaaggtggggaaaagattgagaaatcggatggttgccgtgtctgtgtagaaagaagtagacatgggagacttttcattttgttctgcactaagaaaaattcctctgccttgggatcctgttgatctgtgaccttacccccaaccctgtgctctctgaaacatgtgctgtgtccactcagggttaaatggattaagggcggtgcaagatgtgctttgttaaacagatgcttgaaggcagcatgctcgttaagagtcatcaccaatccctaatctcaagtaatcagggacacaaacactgcggaaggccgcagggtcctctgcctaggaaaaccagagacctttgttcacttgtttatctgctgaccttccctccactattgtcccatgaccctgccaaatccccctctgtgagaaacacccaagaattatcaataaaaaaataaattaaaaaaaaaatgtaaaaaaaaaaaatgtaaaaaaaaaaaaaaaagaaattcatccatattattggatgtatcaatagtttgttcctttttattgcatagtagcattcccctgaatggatataccacagtctgtttattcatttaccagttgatggacatttgggttacttccagttttggatgattttgagtaaagttgcaatgaacattcacatacaagtccttgtgtggacctacgtcttcatttgagagatttttttccttttaaactttttattttattaggttggtgcaaaagaaactgtggtttttgccattactttcaatggcaaaaaccacaattacttttgcaccaacctaaatcttccctctctctggatttgcaattattctgtaaatctaaagttaactttagctaaatcaggttgacatcatataccccctaaagttaactttagatttacagaagagttgcaaatccagagaaccccccgtagtcttcatccaccttcccccaatgttaatatcgtactaattatgatacatttatcaaaactcaaaaattaacatgggcacagttgtattaactaaactcccgactttcttcagatttcaccagttttttccactaatgtcctttttctgttccaggatttaatcaggatataatgttgcacttaattattatatcataatagtcactttcaatctatgtcaatttctctgtctctccttgtttttttatgactttgacatttatgaagtgggctggtcaagtattttgtaggatgtccctcaatctggatttgtctgatgttttctgatcattagactgcagttggggtttggggaaagaataccccagaggtgaaatggccttctcatcacataatattagggggcacatgatatctacctgattgctcactggtgaagttaaccttgatcacttggttaaggcgttgtctaccagagttacccaccgtaagctgctaatttccctttccatactctgttccaggggtgtccaatcttttggctgccctgggacacattggaagaagaattgtcttgggcaacacataaaatacatcattaacactatgacagctgttgagctaaaaaaaaaaaaaaaaaaaaaaaaaaaaaaaaggaccgggtgcggtggctcacacctgtaatcccaacactttgggaggccgaggcgggtgggtcacgaggtcaggagatcgagaccatcctggctaacacagtgaaaccccatctctactaaaaatagaaaaaattagccgggcgtggtggtgggcgcctgtagtcccagctactcaggaggctgaggcaggagaatggtgtgaatccaggaggaggagtttgcagtaagccgagattgcaccactgcactccagcctgggtgacagagggaaactctgtctcaaaagaaaaaaaaaaaaaaaggtctgtgcataaatatcataatgttttaagaaagtttatgaatttgtgttgggccacattcaaagctgtcctgggccacgggttggacaagcttaccgtctattcattagaagtgagtcactcaggggagggagattaggccctgcctcctacagggaggggtttcaaagaatttgtggacatatgctaaaaccagcaccataattaatgtggtatttttttttttttgacggagtcttgctctgtagcccaggctggagtgcagtggcctgatctcggctcactgcaagctctgcctctcaggttcatgccattctcctgcctcagcctcctgagtagctgggactacaggtgcgcaccaccatgcccaactaatttttttgtatttttagtagagaaggggtttcaccatgttagccaggatggtcgcgatctcctgacctcgtgatccacccgccttggcctcccaaaatgctgggaatacaggtgtgagccaccgtgcccggccaattaatgtatttttattattttaaaagttattcttatttttagagatagagtctcactatgttgcccatgctggtcttgaactcctgggctcaagctgtctacccacctcggcctcctaagtgctgggattataggcgtgagccactttacctggcctgcttgtttttttgagacagagtctcgctctgtcgcccaggctggagttcagtggcacaatctcggctcactgcaagctccacctcctgggttcacgccattctcctgcctcagcctcccgagtagctgggactacaggcgcccgccactacatccggctaatttttttgtatttttttagtagagacggggtttcaccgacctcgtgatctgcacgcctcagcctcccaaagtgctgggattacaggtgtgagccaccgcccccggccctggtgtgctttttaatattttttggagatggggtcttgttatgtttcccaggctggccttgaactcctgagctcaagtgatgctcatgcctcagccttcagagtagcaggcattacaggtgcatgccacctcacctggctaataaatgtttttggagggatgtgttgagcctatgcaggtatcctgtttccccttaaagtttgcccatgaacttaacattcctcagtggaccctgcctgcagctattattactgtaatgttctcctggtgattttctattctcccatgccttctgcctttattacatggaattcttctgtaagggaaatttgtttcttctccaggtatttgtttatctatcctctcatttatttatatcagtgtggactcacaagtacttattttattctctgggtgagagatgtttttaagatgggaaaatggactactttaagttaacctaactgtgagccaggtagcaggaggtgtggggaggaggagcatagatgctgggggaggaatgggcggtggatggagcgaagttcctaggaaggtcagtgagaaggagatccggaggtgggggtcttggcaaaaacaagggacaccctgttcccacaaatgggtaagaggaaagtttgggagggtcgatttccatgtcaggaaggagaacttgaaggagttccaactaattagcttttgtcttctccgtcaagatgttttctgtgacgacaatgggaagttgacttttggaattttaattgtcttggccaaaattcctggcctctagagtaacgtttctcaacctcagccctgccgacatttggagcagataattcattgttgtgggagccgtcttgtgcattgcaggctgtgtcgcagcatccctggcctctaccctctagatgctttagtgccctctcctgtttccccagcagtgaccaccaaaatgtctccaggcagtgtcaaatgtgccctggggagcaaaatcgccccatgctgagaaccacagatctaaaattaacacacacaattctggcaatccgtaggattcttcttctctttatttttatttttttgtctccctctgttgccaaggctggagtgcagtggcatgatccatagctcattgcagccttgacctcccgggctcaaacaatcctcccacctcagcctcctgagaagctaggactgcaggtgcacaccaccatgcccggcggcttttttttttttcttgaagagggggactcactgtgttgctcaggctggtctcaaactcttgggctcaagcagtcctcctacctcagcctcccaaagtgttgggattataggcatgagccactgcatccagcccacgggattcttgaccattactttgaaagactaagatgatggcattcacctattaattttctgcagaaagagctaagctgctctagtgtgaacactcaacgttgacgctatggatgagggagggccctgctttcttgggaatagcggatggtcctttcagcacacagcacagatgaatgaagaggaaatgaagttctggttcgcagagggtctttggttctgaaaagcgttgccgtggttctagccttcctcgcggtggagggtgttttgctttctgcgcggtttctgtgtgggccgtgggaagcaacttgattgttatcacagttggggacacagcagctcttctcataggttaatttctgaaagcccatttgttctaaatccaacgtgacgcctaccgagctgggtacaacattggtttgtttcataaaacagcccggggtgtttgggactcttactcctttacaactctcatttgactgtccaaagatgcttgcactggggcctaattttctgtcaccttccctacgtttttaacaagacactgccatttcaaacatagcgaacacgacagattgaggaacaaggccaaggcagaggctgcgacgacctcgtacagccgctgatgccatctgttggtggctggcagaactgatgccctttgctgcgagggagctttgtttattgcacagaaagttgaaagttggcagcagagaaccttgttaccacctgggaggataggattggcaggattagggaggactggaaggggagggaatgcgtgtttgctttgtaggttgtgcatcagtaagcacaatcaggattcagtgccaggaatccatagttgaaacaattttaggaggatttttcaaggttctggctgggatgccatggggacctccaatccatttctcagtcgactgtcagttaaggcattgggctgtgggaagttaacagagcaacagagcggtctctaacgtaaaaaaaccccagtgtctcccatagagctagcatgcagtccttatttgtggaatttgatattgagggacagtattaactcctcactctaatcaaagaagctatgataatatgatgcaaaacaactattatattctatccccttccaaagtgctttcaaagactaaatttgtcttgataccaatccatttataccaacacatccccacatttctgatgatgaaacagattcctagagactaaatttctttcttttctttttttttttttttgagatggagtctcgctttgtcacccaggctggagtgcagtggcacgatcttgggtcactgcagcctctgtccccccaggttcaagtgattgccctgcctcagcctcctgaggagctgggattacaggcatgcaccaccatgcccggctaatttttgtatttttagtggagacggggtttccccatgttggccaggctggtcttgaactcctgacctcaggtaattcacccgccttggcctcccaaagtgctgggattaaggtgttacccaccacgcccggcctagagactaaatttcttaggtccatatgtctgcttgatagcaagagctggaattagttcagccagtgggttcttaactctggatgcatataagaatcacctgggaaacaaaaaaaaatcttagtggttggcttcactctcagatatacagatttattttttaatttttgtttatttttttgtagagatggggtctcactatgttgcccaggctggtcttgaattcctgggctcaagcaatactcccacctccacctcccaaagttctggcattacaggtgtgagccactgtgcctggccagatatatggattaacggggccgggccagggctgggtcctgggctgtgattctaacctgctgcctggggttgaagcgcttctcctccaggtgtggtccatgaaccagtcgcatcagcatcacctgcgagcttgttagaaatgcagagtctcaggccccaccccagaccctctgaatcagaacctgcattgcaacaaggttctcagatgattcctgtgcatggcgaagtttggaaactctgagtgttgcttttgagatcagacatacagtgctatccattggtgtctgtggaggatgtcttatttgtttatttatgagacaggtctctgtcaccagggctggagtgcaatggcatgatcgcagcacactgcagcctctaccttctgggctcaagggaccctcctgcctcagccccccaagtacctgagactacaggtgtgtgccaacacacccagctcttttttttttttttttttttttgagatggagtttcactcttattgcccaggctggagtgcaatggcacagtcttcactcactgcaacctctgcctcccgggttcaagcgattctcctgcctcagcctcccaagtagctgggattacaggcatatgccactacaccagctgattttgtatttttagtagagatggggtttcactatgttggttaaactggtctcgaactcctgacctcagctgatccacccatcttggcctcccaaaatgctgggattacagacgtgagccaccgtgtccagcctgcccagctcatttttatttatttatttattttttggtagagacagggtcttgctatgttgcccaggctggtcttgaactcctggccttaagtgatcctccacctcagccccccaaagtacttggattacagattacaggcataagccaccgcatcaggtctgtttaatttttaccattcagacagcactcaaggcctagtgtgagtggcctccatcgagggccctgggcttccctctaccctgagggttccatgtgcctcccaggttgaagccatgagagagtccagaactacccccaccccaaaaaaagtcttgctcatggccagctgagtgttccacagcccttgatttctgggtgtgtcataatgtagtcaccaagtcaggcctgtgggctgcctctgggtccttcctgttgagagtgatggcatgtcactgctggcttccccgaggatgagaggttcaacttgtttggttcggcccctaagattctcttacattacctctagctcagacactctgcttgtattggaaaactgggaggcagtgccttttcctctttcttcctttctgaaatagaaggtactcagtagatgttggatttggaatattggaatgaaatgaaggctgtgtgggcctctgggcagcctttggtgttagaaacaggcttcatccctgctggacttgagtttcagttgaggagctcctatctgggcagcactcttcaccagcaaaggctgtccgtggtcttttgaaaagagatcttttttagttcatttcttaaaatccagtgctatatgagagccagtctgatcttttctaaatctgtactttcattttgggtagcgcctaaaagagacacagcagtccctgttcaacctcttttcgggaaaccaagagccttggctgcttattcatcccttctctgccgttttcaacaacaaaccccctttgatgaaagaccattctgagacaggctagagctggttccccttttatttctcctcttttccaagctcccctctgccacctcctgtatctcttccaaccttcctcccccaaagaaaaacaacaacaaaccaaactttgaaaaaacaagggaggcttgtccccattggtgaaatcccttgaaaggatgtcactgagaaagggtctctgtggccctctttttccgcaagcgttgggaggtctctgaggatctgacctggggagactggagcgctaattatacgcacagaagccattcattagttgccactagcaagaagacttggccaatgctcactcctctgaattcagaggttttgaaagaaccccaaactgagcctgcgactttcttcaatctttttttttttttaatatatatatatttctttcttctccagcctctctgttctcctctgttgcccacagcaacctcagcagttggtaccagcacagagtggagagggcaggccaggttacctcggtgtcaagcaatcattactgagcaattcaccagagcctcacaaagaaacagatttctctgaaaatctcccgatccaaaccacccccaatatttaaccagcaactccccaaccctacctttcctgagaggtccgtgttttctagtacctgagcagacagttatgagccactgcctccctgcctttttgaggcctttctttaccaacaatgctttgttaactctttaacacactttcctgatgttcacactttctgcctaccacacacacgtccagtagagacagacaagggggagaattaaatgattagccagcagctgcccatgaggaacaggcagtcaggccataggtttttcccttttccgctttaccatgagacagtgctttgtcaaaaggaagtgccaaagttgtcatggaaataaatcattagctagattgagctatctttaatttgggcgggagtctgccattaatatgtctaaatctcagtttacaaatgagcacttgatgacttgattcctgacacttattcttgtgattcttttgaatctcaattagtaagactttctttctcatagaatgccatacggcttcttggaacaaaggacaaacgggtagaatgcttgaaacagaccaaatcaaagattatgatttttttttctgaagggaagaaaaaaataaaattggaaaaataaaaataaggcttatcatgatatcctgccgtctgatttctaaaagtacagttcctttaggttctaaggactggcatgttctttgtgatatttgtcaatgacatgtgaaatgtgctctgagtaaaggcattttcttctgcaatgttcatttctatttcaatggtctgcctcagtacttttctttaattaatactgtttatgctcactgatgaataattcagagttgtacaagcaacagatgtcagcggattcaaaatgactttccctgaattatttattatttccaaaaaagtaacaggtttgttgaacaagtaattggcaacacagatgtagatcaaggtttgtcagcaggcaacaagtttcactactgtttccccttttgtgcatgttgataaccaggatggcattgtctaggagcgggggtctgcctgataccactgcttagggagtcattgacccatcctgttgctgacttggagagctggaaccttagttggtttccaggttgtctaacgatgaaacatgaatggaaattcatccaaaaatgtaattaatgaatgtaggcttgtaaatatctcgcagacagaatgacttaatacaggtgcccagaaagagggaacatctttgtttgcagggatatgttaagaatagagacctagaagaaaaataatttgacagatatgtaaaggtttatgtataagaatgttctctgcagtgctgtttatgacagaatttttgcaaggagacaactcaacgtccaacaatgaaagactggttagataaattctggtagatccaagcagtgaaatattatatcaccactgtaatgatatatatgtatttttgatctggaaaaatgtcaacatattaaataaaagatgatattaagtgagagagtctataaaccgatatggcttatttctgtaggaaaatacatgtatgtatttttttttgtaggcatagggaaaagtctagaaggaactaccccaaaatattaatagtggttatttaggggtagtaggatccagcatgacttttcttctgtctcacatattttgccatcattttcactgtaagtatgcttatgttatgaatctcagttaatacgactttctttctcatagaatgccatacctcttcttggaacaaagcacacatgggtagaaggctaagctgctgtaacaagagatccaacaacattgtgacttaaagaaataaatctcaggctgggtactgtggctcatgcctgtaatcccagcaatttgggaggctgaggtgggcggagcacctgacatcaggagttcgagaccagcctggccagcatggcaaaaccccatctctacaaaaaatacaaaaattagctgggcgcagtggtgcacgcctgtaaccccagctacttaggaggctgaggcaggagaatcccttgaacccaggaggcggaggttgcagtgcgctgagatcgtgccactgcacctccagcctaggcgacagagcgagacctggcctgccttgttatcttctaaagagccaagtctgggtgctgtcgtgagaaggaaacatgggtatggaagaggcacaacttgccgtctcaaggccctggtccaaaagtggcccatatcactcctgctcccagcccttagcagggacataggcacatggccatactccactgccagctgcaaagcaggctgggaacaaaatccttacaggcatttatgtgaccagcaatagctctgtgctatggagaaaagagaaaaggaattttgctgggacagctttcggtctctgctaaatttattgattgattttcaaattttttttagatatgaggtcttgctttgttgcccaggtaggtcttgaactcctgggctcaagcgattcccccaccttggcctcccaaagtgggattacaggcatgagctaccatgcccagctgctactaaatttattacccgtaaaataaaaataaaaataaatttaaaaaggaagttgagttttgattcgatgtcttcagagggcatttccttttggaattaatcatacagaagatgtatactctgaagcaatttgaagatttaaaaaaaaaaaaaggaaaggtataaaatgtggacactgccttccagggatttacagtctgattgagaaaccggaccaataacaattcgaagtagtatatgcaaaaggccagagagtgttcagataagtgcagaggagcaaattggctagggtcatggaataaggcttagataaattgaaaggcttgcaattctgctttgttgagctaccaggattacttgtacttttggaagaaataaaactatttgtgttttgtgacattttagggtagcgtgacctccccttacaacacagaggaactgaatcatattttcctactgactgactaacagtaatttaagactctaattggtcttccgttagctgtcatttattgtaattctttgtgaaatgcacatgatctttaacataaaatatcttggaagagctacaacttaaaggaaacttgacttgataatgtaaaaattatcttttaaataattttttaaatatatggttttaaagctttttaatatggttatcttgagtagggtatttctaggcttatttggaaggcaaaccaaaaagcatagagagttttttttcctcccttggatagaaatttttctgtctttaatagattaatggtaatcatataacacattacctccttcacaataagatcaaattttgcaaatcttttgccttgaatcagattcttcaactctggagtttaggttagtagaacccaaaaatatgttgttttatgcacaaagcctcgcaaagtcaagtggtagattttgacctcttctttaacctaccctgaatgtagtcccttaaaacatgatggaatccacatttggtatttccctgctatttcatgagatgcaacaaaatgtttcaagggagacagtaggaaccatttggtgctttggtgatcttttcaggaaaatctggtttcggaagccccataaggcgagaattattgcaaataaggcccagatttgaaaattgctgttttgcaaattgtgcttattctaggaataatgatttctacagctgggaagaactttaaaaattgggtgaaccagttgcctgctttgacagatgaggtactgcaatgcagagaggtcaagctagttgctggggtcacctagctcatttgtgacaaaactaggaaccgtgggtctgactcagtcctctgccctgccgccctgtaccacagtaggcctctctatattatgccgcttggtagtcacccaccttgcttcctaccatcaaaaggaacttctggtagaaactcctttcacagcctcctgatctgcaggagtgatgaatttagcctgggatgaactgggagtggcagagccatctttaaaccccaggtcctttctggatgctttgtttgcagaagagctgcagagatcatgagggacatttcttgattcatattaatcagaaactcatttggggcagaatttgaacttgtagccaattttataaggaagtttcacagctaaaacctctctgtgttgtaaaaggaggtcatactaccctaaaatgtcacaaaacattttacttcttccaaaagtacaagtaatcctggtatccagataaagaagttttaatttgtttttattggtttaccttgcctcagagttctgagtgttggattttcactgtgacaacaaaaataaaatatttcctgcttattgtaaagcggtcaaagagctgaaaagcaataccatcttttagaatgcatttcttacccttctttgatcaacattaagatgcgttgccactctggggtatgattctggtttgatcgttgcagtgttttggaaaatgtttgatggcctataggtttattgatttcaaagactgtaaatccatctgcccatctatccatcattcaccctcctatctgagagcagtgtgggaagcttctactgaagtaccaataacttggattggtagccttcaagccctggggggacttggtaattccacacttaagtttttctacctgaaaaacatatagctcttaaatttcaaaatacagcttcgtttatgcctgaagaggagaagtttcataacgcagccagcactgttggttgtcatgcaataaccattctcccttcacccttgctaacgttttctttctttttttttttttttttgaggtggagttttgctcttgttgcccaggctggagtgccgtggcatgatcttggctcactgcaacctccacctcccaggttcaagcgattctcctgcctcagcctcccaagtagctggcattacaggcatgtaccaccatgcctggcttattttgtatttttagtagagacggggtttctccatgttggttaggctggtctcgaactccccacctcagatgatccgcctgccttggcctcccaaattactgggattacaggggcgagcctccacacccagcctgttaataacgcttttcttcattccattttcttgcctgtgagatgtgcataagacccagctcagagagttgttgttggttcctactctctaactttgcctaattagatttctgttaagcttgagatcatttatagccaactttttccatattaaaatcataagcctctgttgaaaggttttgttagtccaaattggaaccgtcttgacttcgcatcaaatcattcatctctagctcagtcgccacataagcttgtataattctctcagggcttctgtcattgttaatttacatctgaccttgttctgaaaactatttaaggcagtggagccctaacttagaacttgctggcttttaactttgccagttggtctggacctgtgaaaatatttatccaatcccctaagaaatcagagtaaagattttcatgaaaacttctagccgggcacagtggctcatgcctgtaatctcagcactttgggaggccgaggtgggcggatcacttgaggtcaggagttcgagaccagcctggtcaacatggtgaaacctagactctactaaaaatacaaaaattagccaggtgtgatggtgtgtgcctgtaatatcagctactttggaggctgaggtaggggaatcgcttgaacccgggacatggaggttgcagtgagctgagatcatgctactgcactccagcctgggtgacagagcgagactccatctcaaaaaaaaaacttccaaaaccatttttacatattggtttattttgactcttgatcgttgtgccaagaaagttgattatgactagcgtttccatcttacaaatagggaaatggaaaactcagaaaggtcaagtgacttccctgaggttggtaaggagtggtagagccaggatttgaacctgggcagtgtagccacagggtcctcactcttaaccacttggctaaactgtcttcatatacgtatgtatgcatgtgtttggttcccggtggtgatgccatggggagcatttaccatgagcgcagtgggaaaagcatggagcatgctggaaggcatggatgcttacattttcattccggatttgtggattttgcactagggtatctgctaggccatgaactagaattgtgtactgagagtcatcattagttgggtgatttttttttttttttttttttgacataggcactgctctgtcgcccaggcagtggtgtgatcttggctcacagcaacctccgcctcctggattcaggcgattctcctacctcagcctcctgagtagctgggattacaggcactcaccaccacccctggctaatttttgtatttttagtagagatggggtctcaccatgttggccaagctggtctctatccacccacctcagcctcccaaagtgctgggattactggtctcagccgccgcacccggccaattagttagatctttctacggaagaacaactgacttgccaatttagtctgtaagatcaggagttgagggacattggaactacagaaaaacattattaaagatgactcttaagatgtcaagaggaaagaaaaatgacttcttcggtcaaaaaaagagcaaaagctatcacgctgtatgagccacaagctgaaggctgtcttctgggggcggcttaaatgcattagattagtctgcaatgtggattaagggaccgtgggatttaataacttgcgtattaaagaatggctctgcaaatgttaccctaacataaaaatgtaagcattctaattgaatttagaagcaatagtattaaaatttcttctggtgatgctccttagacgcattaaataaaatatcaaaagtcacaattgattaaactgaaactttagcatgagagttattaagcattaaattctgctgctagaggtttttattttattttttcctgacatgtactcagaaaattctccctttacataatttatggtcattctgctgtttaaatgtgccaaaaaatgttctcggagttttggcagtgttttgaaatagagtatattatcttagtcttgggctatatatatataatgaacactcaatatatattgatggtggtgttttcatgagttgaagtctcgctgtgggcaaaggaaggaataggctattctattacatctgatgcttagcctgcctttaatgagtaatgtagaaaaatagacctcttcttcctcctatggcaagtctgtatgtagtcttgctaagcttgtgtctgcccacaaatcctaatgagaagatggcattgatcggagatggtagcaaagtacagctgggatactgctgtccatatgttccatggttccagaattccaaggactacagacagccttgtagaaatcacaaagcatgagtgatagttataagcaaagaggtcttctcctttttatccaaggacaagcaaatggcagggaggcagaaaggtgacgttttgaatctgtagacacataacgaggaatgtggttgactgaaaagtgtctatgcatttagggcggtgagagcagacagttaggggcatccaggaaacctcctcctctcttgcctttcagggtgtctcctggagtcccgagtgtggcatgttctgcattcaagagtattgtggaggccagacgtggtgaaaccccatctctactaaaaatacaaaaattagctgagcgtggtggtgcatgtctgtaatcccagctacttgggaggctgaggcaggagaatcacttgaacctgggaggcggaggttgcagtgagctgagactgcaccaccgcactccagcctgggcaacagagcaagactctgtctaaaaaaaaaagagtactgtggaattcattcttatgtagctgtatgaaaaagaaaaccaacatcataaaatatgagtactagtttgaagtccattacagacaaatcacaccatttttatgttagaccaccccaaccacttcccttttttgtttttgtttattttgacaggttctcgctttgtcacccaggcggaagtgtagtggcacgatctcagctcactgcaacctctgcctcccaggttcaagcaattctcttgccacagcctcctgattagctgggattataggcactcaccaccacaccagggtaatttttgtatttttagtagaggtggggcttcaccatgttgaccaggctgatctcgaactcctggcctcaaacgatccacccacctcggcctcccaaagtgctgggattacaggcatgagccaccacacccagcctcctttttgttattgctcagatttacagaaatttattttgcaaaattttacctcgaagaaacaagcgagtgtttctctgtatccatctgagctcaggaggatgcccaagtgaaaggtgtttaatccaacttctgttgaatgattgacttctcagggactgttaatttgtaaactctaagaaagggggaaagtttaagtttttccggctgccaaactttgggcttcatggtgaatcatcaggacaggctttctaggccaagtgtaagcgctgttctgggggccactggtctgagggtgggggagcaggatgtgtttatttagatgcacggccagagttcacacacttggggtttgggatcagcctccagggcctaagtaatttctcccaggagatgtcttcgcatcttataccctgtataggatcatcacggactgctgattgaagaaaagggttaggaccactgatcagagagaagctacgattttttcttttctgtctgtcacagaggtgtcagtaaaggagaaagcttacttgaaaggtttggattaccgagcagctcaaaagagctgttgctggcgggattttctccttgctgaagtttttctttgcccctagaatactaagcaaaaaggaaagaaaagatgaaaggtaagtccctctttaaaaatacattgagtcaacccatcgcagaaaaatacagatttctcaactgacaaataagcggcatcactgcatttgggaatcagaaaaagtccccacgataaagttatttgggaattaatcaacacttggctcatcctaggcgtggagcgcttcggaattcacctcgtgttgcttggaagctggcagcccggttgttatataatgtgaacccagaggcctgccagacggccctccctgtgccccgggggagttacaaggctctgtaactcttggagtcagtcaatcctgcagaacagagtccaggggcctggtgtgtgctgtgttttacagatgacacattaacctttgaaattctgtcctcagtcaccttcatcaatgcctgagcgaacgaaggaagggccacatgtgggctctttttttgttcacttttccaaatggagataagacatgtaacaaaatttaccatcttaaccatttttaaatgtacagttctgtgttattaagtgcattcctatcgttgtaccagtatcaccactatccatctgcagaactctgcatcttgaaactctgtgcctgttcagtggtaactgcctgttcccctcctggcagcccctggcagccgcccgtctctgaatttcagagccactttctgtccctgagtttgactactctaggtactcacataagtagaatcacactgtatttgtccttgtgtatctatctggcttatttctcttagcgtaatatcctcaaggtgcatctgtgtggtagtgtgtatcagaatttccttccttttcaggagtgaataatattccattgtacggatataccatgttttgttcatccatccatccctccgtggatggacatgggttgtttccaccttttgactattgtgaatagtactgccatgaacacagttatacaaatacctgtttgagcctctgctttctgttctttggggtactttcccagaattggaattgatgggtcatacggtaacagactccttttttaaaaaagaaaagtatcttgagaacttgggagagccaccctaggagtacttactgggctggattgtttgctccgtctccttttgcctccaggtacagcccataggcctctgtcctcacagatgtggtatggaagagtggccctgttccagggtgagatcaccagtgtagaccttctcagtttgaccctacatctgatgaacccccaaaagcacagagaggatctcagaatgaactaaagatcatgggctataaatgactccttccttctccttttcttccttggatgacaaagattgtggtcactatacagttatggtggcctcaagtctggtaaatcaatgatgtttcatgttagctgctcacgggattcaccttgtggcttattgatgtccagaccccgcctctgatcccgcctctagagattctgatttcattggtttgagtcctggcctcagcatggggacttttgaaagcttccaggcgagtctaatatgcagccagggttctgtagcacccaagtgaattactgaacccgaaccttttctcaatccctttcatgctgtctgttgtctttttggttatttcttttttctttttcttttttaatttgagatggagtctcgctctgtcccaggctagagtgcagtgataggatcttggctcactgaaacctcttcctgccaggttctagcaatcctcccaccttagcctcccgagtagctggtattacaggtgtgcaccaccacgcccggctaatttttgtatttttagtagagacggggtttcaccatgttggccaggctggtctcgaacctcaagtgatccatccccctcggtctcccaaaatgctgggattgcaggcgtgagccaccacacccagccaggttatttctttggagcatatcttcagatttgtacatctcagcccaaggtttaaagatttggaaacaggcttttctgtgtgtgtgtgtgtgtgtgtgtgtgtgtgtgtgtgtgtgtgtgtgtgttttaattaacgaggatgcattatgtaactttggagctaagaatgaggaatgaggatgcattatgtaactttggagctaagaatgaggagacctgggtcatacttgtgtgtgtgtgtgtgttattatctaaccagggataatgaattatttaacttggcaggatctcagtttgttgttgttggttttttgttttttgttttgtttttttttaaatcttggctttaaaattagggcatagattggcaaaccagataaaagaatgaaattaatgatttttttaaaaatgtcccctctagctctgacataccacgactctgaatgaacaggtggaattgatggggagtgaggaggcttggagagagagcccccgggtgtgaacccatcctgttctaacaataatgagctttgggatgaagagcctccccgcaggcaggggactgctgggagtttctggtgtcccagaagaagccttcagggcagctctgatcagtaaataaaaggatacgaaataaaaatctcaaaggatccgtaatgaataagaaagcaggaatgtcgtccccagggagaaatgagttgggggctttgtcagtcacgagagaacatagcacaggactctgggtccaatggagctgaacgtcagcgcctctgtccccacgaaaatagtaacttccctgacaccatccacctgatgccaagagctgtttatatcaacatttcttctcgggattctttcaaactttatacttacttctctcctcctctgattctattcaaggaatgtgaatggctgaggttttgttttgttttgttttcctctctagattagcacagctaatacagtggaattgtgatgccagggtctattagtgtagagaaacaaagaatgcagtcctgccctgggcaccagggtttacttccatggtgacttcttcttaagcccatgggaaagtgagagggaggtgacctcctcacagtcggctcagcctctggagcccggagccggagccagccccatagtgtgtggccatcaggatgacgcagagaggcgtgtgaacgcagccggccactgcagctggtgcacttgactctgggcagcgcgttcccaggaacccgcaggacactgaggaccgtgcgtgatgtaacccagatctgccagatgtgggagccagcatgagtcacaatgccgggccgttcattaagaaatgctttctgggtcatctgggtgcagggcactgctgcttccctgctgtccagggttggaggcatcaagtctgcccaccaggaatccccaagttcatgaacatctgtctaaaattatagcctggttttctgagctgatgtggcacagagcacacgcacgctgatggtctctggcttgtaatttgttaaaggatctcaccactttggttagtggtgggaaatcagataataaaaacatacgcccaggtgggagggtcacttgaggccaggagtctaagaccagctccagcaacatagtaagactccgtttctgcaaaaagataaaattacctgggcatggcatgcctgtagtcctagctacttgggaggttgaggtgggaagatggcctgagcccaggaattcaaggctgcggtgagctgtgatcacactactgcctccagcctgggtgacagagtgagaccctgcctcaaaacaacgacaaaaccaaaaaccaaaaaccccaaaagtgtaagttgctgtgaggtttctgcacattttagtaagatcagaaatgaggtggggtgttgggagaagccaaaaactgtgctggcattgtgccagtgaaatgccagcaatcacgagcggtcttcctttttttttcttttttttttaaaaaaaaaaagatgtgcaagatgccttatggtgaataacaagtatatttctgagaagttgtaaactaactccttaaaaaaaatccttatggatataagacatacagtcagaaaagttcatgcatgcatccctgggtaaaatctgacacccaagtaactgtagcaagttgaagggtggccccttaaatatcccccagagcctgtgaatatgatcttatttggaaggagacctttgcagacataattcaatcaaggatcttgagatgagatcattctggattacctaagtggaccctaaatccaatgacaagtgtccttacaagagacagaagaggagaagacacagacacacaggaaggaaacatatgaagcaggaggcagggattagagcactggagctgcaaggaacagctgagccaccagaaaccaaaagaggcaacaaacgggtggtcccctcgtgcctttggagggagcctggccctgctgacaccttgatttcttttttctggcatccagaactgtgagccagtaaactctgttgtgtgaagccaccaagtttgtggtgatttgataaggaaactaataaaatcatcacacctagatgaagaagcagaatgtttccaaaaccctggaaactccccctcaagcctagtttctgttttcacaccgccccaggacagctactgtcctgatttctaacgccggggataggttttatgccatttgaacataataaatggaatcttacggtgcatcgtcttctgtgtcagatttcttcccctccacgctttgtgagatgtgtttatcctgttgtgtgtttgatgattctcactgctgcttagttgtagtgttccacggtgtgaatataccacgatttatttactcttctcctgttgggggcatttgagtttggggctacgacaaagagtgctgttacaaattctgtttcgttcctttctgatgaatatacgtgggcgcttttgtgagttacattctcaggagctgaattgttgggtcataggctatctgtgtgttcagcttcagtagctattgccagttttcctattaattttttaaacaccccatccgatttggaatctctgtgtgaaatggagaatccaatggtagattcagtaaccactctttaatgtggctattttataaggtccaaatgttgaacgcagggttttcttggagcaagttccttccttagatcacaatcaggaatattccatgtctcagaagagcccattacagggctgggcaggcgtgaaagcacaccagtttctgggaatcggagaggctgggctactgactgtgaattttaaatattcttaacccatcgctggagtgatgaatagcacagctgtcgtatcctccatctcgagactcagaaataaatttgcagtcttttaggagctccagttttaattctcctttccagcttttaagctctatgctccataacttaggatgcaaccaaatgatatgcagcatttctaaatattctgctttgataagtgagtggaaatagtgctggtacagcggataagactagattaaaacccagggtccccagctgtctaaagaagatgtgctgctttggatttgcctgatgccccaagatctttctggaaatgggggagggtggctttgaccttggaaatactggaaaggggaggaaagtgtggtgatggtacctcagaggactgttttccctccagacgtgagatgggtgggatggtagcaacctagctatcattatgactgataagccttctttttcccaatacaaaagcaatttgtcttccttgcagaatgagaaaaattcaggtccaccagaaaataaccacaaacctgacacccacagttaaccactgttgaatatatttgcatatatacatttcatatacaaacctttcttcccatacaaacattttatttctgcagtcaacgagtatgtattgaatgcctgccatgtgccagtccccagggatagagcatgaataaaacagacaaaccatcccctgtccttgcggagctgaccttccagtgggagcttattatacgatacatatggtactaaaatgagatcttatggtacatgtttcttatcggttgcttttttccactaacaatatgtgtaacctctttctttctttctttctttctttttctttctttctttctttctttctttctttttgagacgtagtcttgctctgttactcagactggagtgcagtggcgcaatcttgactcactgcaacctctacctcctgggttcaagcaattctctgcctcagcctcccgagtacctgtgattccaggcacctgctaccacgtctggctaatttttgtttttttaatagagacagggtttcaccatcttggccaggctggtcttgaactcctgtcctcgtgatccacccgcctcggcctcccaaagtgctgggattacaggcatgagccaccgtgcccagccctgtaacctctttcaatggcaacagatattcagatataacttttatagatttatcaatgaactaaatccccagtggttttgcttgctggtggtggccagcacattcggagatggtgactgctctgatagtacaggtcccagagtgccaaaaggaccagggtgctgccattgacttgcagaagcaagaagtaggctgggtgcagtggctcacgcctgtaatccccaggaatttgggaggctgaggtgagcagattgcttgagtccaggagttcaagaccagcctgggcaacatggcaaaacaccatctctacaaaaaatacaaaaattagtcggacgtggtgctgcatgcccgtggtcccagctactcagggaagctgaggcaggaggatcatttgagcccagggggtcaaggctgcagtgagctgtgactgtgtcactgaacttcagcctgggtgacggggagacctcgtctcaaactggcaaaaaaaaacagcaacaacaacaagtagaagtaaactttggcaatattgagccatggagttgtttttttttttgttttttttttttttttttttttgagacggagtctggctctgtcgcccaggctggagtgcagtggcgctatctcggctcactgcaagctccgcctcccgggttcacgccattctcctgcctcagcctcccgagtagctggggctacaggcgctcgccaccaggcccggctaatttttttgtattttttagtagagatggggtttcatcatgttagccaggatggtctagatctccttacctcatgatccgtccgcctcagcctcccaaagcgttgggattacaggcatgagccaccgcgcccggcctctgagccacggagatcttttttaaaaaaacttttattttaggttcaggggtacatgtgcaggtttgttatacaggtaaactcatgtcatgggggtttgttgtacagattatttcatcacccacttactaggcctagtagccagtagatacgttttctgatcctctccttcctcccactctccaccatcaagcaggcccccaatgtctgttgttcccctctttgtgtccgtgtgttctcatcatttagctcccacttgtaagtgagaatatgcagtatttggttttctgttcctgcattagtttgctaaggataatggcctacagctccatccatgttcttgcaaaggacgtgatctcaattcctttttgtggctgtatagtattccatgagctgtggagatgttgaggttctttgttaccaagcattaactggccagtcctgaccaatacagctatggtcataacatataaagcaccttaagggaagaggacgtttagctaactctatgatgttgtcacgctgacatgaatagagagggttttgttttttaagccaaagacgttaatccattaattggcatttaaaaggtagaaatgccattggatgtaggaaagttcatctgtatttgaccattttttatttatttttgactctttatgcttataattttggaaattccaaaatacaaaggagtttttggtgatgctgggaattgaattctgaggagaaaatgttgttggaattatagagagtgcttttggaatactaccaagcatagtacttgaccttagaggaaaaaatgctggggagcacaacttaagatgggaaaaaagaacaagtttttaaaatatcatccctctaacgaatgcttccgtgatggaaacactcccctttccctgttatcgttcttcatttcctcctactctttactttaactacaagttcttgtatgcggttattcccccatgtaaattacatgaaaaatagttttagtcttctaactacattatccaatatgcagctttttaactagttccaagaggcatttgaggcccatgcgtggctccctttgagttgagtcatctaaaggttattgctcgtcttagtaaaacctgtgctgtgttgagtgcaccggtgacgacaatgaccccagtcttgagtcccagcctccccgtgtttactatggaattatcacagttccactcttgagaaatatggaaagcactcactgttcactctggtttaaccctcctgagagcaggaggtatgattaatcctggaaataatgggttcactctgtgggagcgcttcagtgattttcaaccccagactcatacatggtgattgaaaagaactagtgtgatcacagaaggttagcagaattatttctacttagaatagaaatgagaaggttgagggtcgtaatttcaaaaatggaaaagtaggttttaaaaattcaaatgtaatacataaatattccaaatatatttagagcgagaagccttctttccgccctcccaattctgcccttctctgcagagcttaccatagtttaaaaaaaaaaaaaagtgctgttttatccttttggaccctatactgtgcatttataaatgtgagaaaaccaggcatggtggtgtgtgcctgtggtcccagctactcgggaggctgaggtgggaggatcgtttgaacccaggagttcaaggctgtttttagctatgactgttccggtgaatagccactgcactccagcctgggcaacacagtaagagcctgacgttaaaaataattaacatgagaataaaacttatctatgttttttgtttttacataagtagtcacacaagacatattattataaacctccttttttttttttttgagacggcgtctcattcagtcgcccaggctggagtgcaatggcgcaatcgtggctcactgcaacctccgattccccagcctcagcctcccgagtagctgggattaaagcttaatttataatggaagtcaccctgtgcaggcacacttataggtactgtattctttggagcagtagctcattaaattgataaataaaactttattttcttaatgatggacatttaggaagtcgtctttttttttttctattacaagtaagataaacctgtgtctccataaacttgttcgtgtcttttttttttttttttttttgagatggggtctctgttgcccaagctggagtgcagtgatgtcatcatggctcactgcagtctcgacctcctaggctcaagcgaacctcccatctcatcctcctgaataggtgggaccacacgtgtgagccaccacgcccagctaatttttgtattttttgtagagacatggtttcgctatgttttccaggctggtcttgaactcctgcactcaagcagtctgcctgcctcggcctcccaaagtgctgggattacaagcgtgagccaccatgcccagcctgtttaggtttttgtgcacttgtgtatttttctttcttttttttttttttcaagatggagtctcactctgttgcccaggctggagtgcagtggttcaatcttggctcactacaaccttcattttccaggctcaagtgatcctcccacctcagcctcctgagtagctgggaccacaggcatgcgccaccaggcctggctaattttttgtatttttggaagagacggggtttggagttttcaccatgttagccaggctggtcttgaactcctgagctcaagtgatccacccacctgagcctcccaaagtgctaggattacaggcgtgggccactgcgcttggcctctatcttatgtttattatccatgtgtatatcatcttcagaaactggctccctcatatctcttgcttattatttccttttgggttatctttttaattaatttaggaactctttatatattagcaatattaatctttaatattggccggacatggtggctcaggcctgtaatcccagcactttgggaggccgaggcgggcagatcatctgcagtcaggagttcaagaaaatactccattgtatgtatataccatattttctgtatgcattcacctattcatgaacatttaggttgtctccaacccttggctcttgtgaataatgctgcaatgaacttgggtgtgcaaatatctctttgaggtcttgttttcaactcttttgggtatataaccagtagtggtattgctggatcatgtggtagttccagttttaattttgttaggaagcttcgtattgttctccatagcggctgtgctacttgacaagctcatcaatggtgtgcaatgattccagtttctctacgtccttgccaacacttgttattttctgttattttgatagtggccttcctaacgagtgtgaggtgatatcccattgtggttttgatttgcatttccttgatgattagtggtgttgaatatcatttcatatactcatgtactcactagtcacttgtgtatcttctttgtttttttttttgtttgtttttgtttttttttttgagatggagtcttgctctgctgcccaggctggaatgcagtagcacgatcacggcttattgcaacctctgcctcccaggttcaagcgattctgttgcctcagcctccagagtagctgggcttacaggcacccgccaccatgcctggctaatttttttgtatttttaacagagacagagtttcaccatgttagccaggctggtctcgaactcctgacctccagtgatctgcctgcctcagcctctcaaagtgctgggattatgggcatgagccacgtgcccagcccgtatatcttctttgaagaaatatctattcaagtcctttgcccgtttttatttattttgagaagcagagtctcgctctgttgcccatgttggagtgcaatggtgtgatctcagctcactgcaaccttcacctcctgggctcaagtgatcctgccaccttagcctcctgagtaggtgggactacaggcaagtgccaccatgcccgtgtaatttttttatttttttgtagagacaggggtctcaccatgttgcccaggctggtcttgaactcctgggctcaagcaatccaccctccttggcctcccaaagtgctgggattataggcatgagccactgtgcccggccagcctgaggaatcttaggaaacaaagtaaagaccttggcctgaatagctggtctgctacctccctacttcctactgcccagaggcaattacagtcatgcaccatataacaatatttcagtcaaggaaagatcgcatatatgatggtggtcttatgagattataatgctgtatttttactgtaccttttctgtgtttagatacacatacacttatagttatgttacagttgcctacagcattcagtacaatagcatgcttttcaggtttgtagtgtagaagcaacataggtgcgtagtaggctacaccatctaggtttgtgtaagaacattctatgatgtttgcacgacagaatcatttcacacatttctcagaacatatccccatcgttaagcaatgcatgactgtacatctgttcttagttcttccattggtgagcctccatcgttttaaataaatgcatatactgtatgctctttctcaatgtatcagttttagaattatccatcttctccccttgaatatataagtaggctgcagaggatttagtttgcttgtactgcttctcagcttatcttcttctgatggttaatcattttaaacaattagttttagttctcttagctacctctagttattgcatttctgtctctgtttcttgttttgtcagttttcggcaatattctctttcctttctaaataaaacattaaggccttaccctttcatttttctcccttttacgttgtccaaattctggataaatgaatatggtatatccataaatgggctattatctggtaataaaaaggtatgaaattctgatatatgctacaacatggatggaccatgaaaacatcatacccaagtgaaagaagccagacacaacgagccacatattacatgattccatttatatgaaatatccaggataggcacagaaagttgatgagtcattgccaggggcctcgaggaataccattaactgcttatgggcaccaggtttctttttaggataaggaaaatgttctgaaattagatagtggtaatggttgtaacaacctcatgaatatactaaaacccactgtattctacactttaaaaggacaaattttatggtttgaattatatctcaatttttttttaagatttttttttttttttaattgagagaaggtctcactctgtcagccaggctggagtacagtggcacaatcacggatcatggcccatggctcacggctcactgaagcctcaaactcctgggctcaagtgatcctcccacctcagcctcccgagtagctgggaccgcaggcgcgcacaccaccacacttgacaaaattttttttttttttaagtggagacaggggtctctctatattgcccaggctggtctcaaactcctgggctcaagcagtcctcccatctctgcctcccaaagtgctggaattaaagacgtgagccactgcacctggccaaaagaaagattcttaactgttacattccatttattccattttctaatcttaatatctttagcttatttctgaatgttggacaccagtaaacaacatttattgtcgctgtgtaaacattgcccactgcaggtctaggtgctaatgtcatattattactttctctataggaccaatgccacaatccacaggccacctagaggatagcatttcatgcatcgcagttcgagtgaattctcttttcttatttaccatcgactattccttttgtgttatcctggaattccttcttgctttctttttcatatagaccccaaaaatacactttcatcacctagtgctgtagatgcactccgggttatatgacatctccttacttctcagccatcgtcatctggctccaatctaccagcctgtcctgtctccttcgctgccttgtctcaacattttattaaatttatttcttcctcttttttgttccattcccttattttgcaaccttttggatgttaccctttggaagttaccctcttgtaacttccacattaaaagtttgggggctggctgggtgcggtggctcacgcctgtaattccagcaatttgagaggccaaggcgggcagattgcctgaggtcaggagttcaagaccagcctggccaacatggtgaaatcctgtctctactaaaaatacaaaaatgagccgggatgtggtggtgggagcctgtaatcccagctacttgggaggctgaagcaggagaattgctcgaacgtgggaggtggaggttgcagtgagccaagactgtgccattgcactccagcctgggcaacaagagcaaaactctgtctcaaaaaaaaaaaaaagtttgagggaagtaagctttctaaattctagcatgcctgaaattctcgtcattttggtcttctgctttgtcggtgcctcagtttcctcatctgtacaagggaggtgatcataattacactgacctattagtgagtattaaattaacgaggattaaatgagctattgtgcagaaagtcttaagacaacttttggtacatcataaatttgtttgggaggcgttaaccattcacgttgtagttgaagcacattagatgtgtcttcgtgttctgcactctgaagacatcgtgtggactaacagcaaagtaataagatgaaagtttgtgtggtgaagtaaacgatcctattaccatagttgaaccatagcttatgaattattccttagtgctcttctctgctttcataaaatcataatccgtgttttaagatttacttgtactttttttttttttaggccactaggctgttctcagctctctagatactcagcaaagcacagtcatttccaggaaatggattgaaattgtaatgcagatttggtttagatgtatgcaagtggctttggagagtaacaatgcaatctacttaaggagattggaaaatttaggatattgaagatttaaggaacgggttggcccaagtaacaaaaccattgccctagtcaatctatagtggccacttggaacactggatggaagaggattgggggcagcattggggctgttgtcagtaagtgacatctgccatggggtagaagggtttgtcattcctggccttaccttgatcctttctcatgaaggaagtacaagatattattgagaggatctgacagggagaattggtctagttttgggtacttgaggaagtttgtgtgaagtaagattattgcattgcattgcattgtattgtattgtattgtattgtattgtattgtattgtattgtattgtattgtattgtattttagagatggagtcttgctctgtcacccaggctggagtatagtggcgcgatcttggctcctctgcaacctccgcctcctgggttcaagcgattctcctgcctcagcctcccgagtagctgggattacaggtgcatgccaccactacgcccagctaatttttgtatttcagtagagacggggtctcaccatgttggccaggctggtctcgaactcatgacctcaggtgatccacccaccttggcctcccaaagtgctgggattacaggggtgagccacctcgcccaggctctatttctttttaaaggaagtggagatgtcaaagaaaacatatttgttgtgtagagttttagaaaataaagttaccaaaaactcaaaataaaagaagtagatttattgagaagtaagtctacaggttgtactgggggttggggtgggagtgctccaaggattatggctcctgaatttcccattgtaggactgggtaaaaggtggtaggaactagaaaaaaaatgatatcacttaatgaccactttgtctcataaatgagatgactaaagcttaaaaggtaaggtgactcactctgggtcacagagctggcaatagaatccagtggcctggttccatcttgacggggagggagggggcattgtttgttgcccaggtaccatgtcacactctgagtaacttctctgcagcccttgtattttctctgtaggggacaagggaaaacttaccctttgtttcttgaaacaaaggcaaattaataggggaaaagccatacaaatgattagcgtgcatgggaggaaaatcacaaagcgattacccagtatcctaatggggtacagatgtttatatatcttattttttagaggaaagggagaggggaagtgtggatgattttagggaggtagtagatgatttttagggaatttgatgggcctgaagaacatacaatggattgggacaaagtctgttgggcagacaatggtttgtgacaaaattctgtccaggtgtgttgactgaattcaggctttctttacgcgatatgagttcagttaatgaaaacacaggggagtgaccagaagtgattgtttccttctttggcatttctgtcttcctctttttttgttctattcccttattttgcaaccttttggatgttaccctttggaagttaccctcttgtaacttccacattaaaagtttgggggctggcagatagaaggaactccagagaacaacttgattctgtgctttgggagagacagagaaatgaggggtgtggaggaaggtcagagagaccctgaggcttctgcctcacttcagcatgtcaaagcaccctattttggggtattgctttctgagccccaacatctccagccttccaggagtctgtggcatatccttccccaaaggagtaggatcacttgaccactctactgaacctaagttgtttttcattttcttttgcatctgccttgaagtctagagcaaatgaaaatacaacaacactgtgtaaacaaaacacacaaaaaagctgctctgatctttctgttttctcaggtgcaaaacaggtcttatctaaagcaactgaaaaggcatggaggtagcaattgctttgctattccaggaactagtagccaccacatgtgtaaaactattgaagaacaagttttcaaccttctgctgtgaaaaggtacacaggaatggctaaagtctctctagaacccgtaccttcctggagcaaagggaagacctgggaaacgttttgacaaagcaatgcttacgatatttttcaatatcaggggaattcagtcagtcttctttcttttttgtttggccagtttagctaaagttttgtcaattttgttgatcctttcaaagagccaacttttggttttgttcagtttctctgttatttttctattctctagttcattagttaattaatttaggttaattaattaatttaggtttgacttgctttttttgttccgctgtcttcaggtggaaggttaagttattgatgcgaaatctttttcttttttaatatatgcatttacagctatacacttctctttaggtagcacagccttagctgtgtcacttaagttttggtatgttgtatcttcatttctaatcatctcaaattattttctactctcccttgtgatttcctcttaaacccattggttatttgtgtgtgttgtttaatttccacatatttataaattgcctgaatttctaattctattccattgttgtcggagaacttgccttgtatgagttcagtccttttaaatttactgaagtttgttttatggtctagtatacggtctatcctggagacttccacatgcactgaaaagagagtgtattctgctgtgttgagtgatgtgttctgttgattttttaggtctaattggcttataatgttcaagtcttctgtttccatgttgatcttctgcctagttgttctatccattattcaaagtggggcactaaggtctccaactatagttgtgatagtttagtttaattgtgcatttctcttaccaattctgtcaatttttgctttatgtatttcagggctctgttaggcacatacctgtttatcattgtatcttcctaaggaattaccctttgatcattataaaatgtcccactttatctctggtaccattttttgttttaaagtctactttgtctgatattagtacagccactccagctttcttatggtttactgtttacatgacatatttttcctgtcctttaattccagtctatttgtaactttggatctaaactatctcctatagacagcatatagttgggtcttttttttagtagagatggggttttaccgtgttagccaggctggtctcgatctcctgacctcatgatccacccaccttggcctcccaaagtgttgggattacagacgtgagccaccgcgcccagcccaagttgtttttgagaacacctgtagggagtgtttcctagcctttgcatgtgttacgcttgcacacagatgacagattggccatatgtaaaattttggagtaactctcttttccctcgcaattcttttgatggtgtttcttcgtatttttggcctccccctctacctggattgcactggagcctgctatcaagccttgtgagacgtgccttttgtccagttgttgatcctccattgttactccaccctttcctgccctcctgggcactgggcaagccttagtcccactcagtccctttcccttttctctccctcctccctcaaatcatcatgcttgggctggcgagatattacctagggctactgaaaagtcactttactatgggcaagcatataaatcatatttgtaactggcttttacctactgaaaaaatttcaatatattttaatgtgaagagacactgctgaagaaaaggaaatgaagaaaaggtgaagtaagattttacacacattttcagattagatgatactaatgttcctgaatatacaatctccctttagatttaagatattgtttttagtttagtttagttttgctttgtttttcaaatcactgccctaatcatgaatttcagtctttgggagaaggaatggccctcatggggtggggaaagcagtagttttttcaggtgtaactgacttttaattgacacaaatttacaaatttatattacacaagctgaaaacaatttttttctgtttaaataatgtatttgctatctgaatgatcatgtaaattcaggacaggatttgcctatttttattttattatactaataataaaaccccaattcaaatgacttttcagtacttactatacgcgatgtactgcgggtaaacaagaaaatttcttaaattctcattcaataattggaaatcgattaaattacacctatactaggagagattttatgcaaccattgataatttttgaagaatatttaaagatatgggaaatgctgataatatattcagttagaaaaagcacatttcaaagtaatatattcagtataattttcatcgtatctaaaaaaaattcaaaaccagaattcaaaactaggaagaatatgtacccaaatgttaacattgtctatttctggatttgtttttttaaaaaagtttccttattctaatttttctagaatgaaaacaaatcgatgctataatcagttgatagtatggtggtggtggtggtttcttgtaatgacatagacccactcgttaggattgccaggaatggacacattcatcccacttcaacgagtcactgtgacctcttagaaaaggtgggatagaggcagggccttgatggaagagtaaaatattcatagatgaatacatagaaagaatgactgagtcactgagcagagaagccacgctgagaatgtgtgcagaacagagcaggcaagcagtcagtaaccggggtggatgatgctgagactagggtgggtatgagtcaaggccgagtccgagagctgcaaaaacttgggagaggagttcagatgttgctgtgtacgttggagaaaatcattaaaggtttcagatttgcagtgagatttagatctgtctgggcacgcatggtggctcacacctgtaatcctagcactttgggaggtagaggtaggcggatcactttaggtcacaagttcgagaccagcctggtcaacatggtgaaaccccatctccactaaaaatacaaaaattagccaggcgtggtggcatgcatttataatcccagctactcgggaggctgaggcaggggaatcacctgaaccaggagatggaggtttcagtgcgctgggatcgtactgctgcactccagcctgggtgacagggcaagacttggtctcaaaaaaaaaaaaaaaaaaaaaaaaagagtagaactgtgttattgaaggctgggagaccaggggcaggagagcatttaggaggtgtgctcctggtttgttctttctcttactggtccttctcagtgtccttcctgggtttttcttccttcccctaccccttcactgttgttgctcctgggtactgtttagtgcccatcgctccatggcttcactgaccatctgagtgctgtggtcttctgaccctgagctgcaacctggatcgctttcctgggctgcaaaccaggatgtgtttaaacatgtccaggccacctagttgtccccggaatccttaacctcacaggaagttattttttccaaagcctgctcctcctccttctatatttaattcccaagagtaatctccgttctcccatcctaccagttacgcagccagaaaattgaatgtcctcatgaaatttgcaaagctgttaccagaaaggggccctgatccagaccccaagagagggttcttggatctcaaggaagaaagaattcaggtcgagtctacaaagtgaaagcaagtttattaagaaagtagagaataaaagaatggctactccataaacagagcagcctggagggctgctggttgcccagttttacggttatttcttaatgatgtgctaaacaaggggtgggttattcatgcctactcttttacaccatatagggtaacttcctgatgttgccatggcatttgtaaactgtcgtggctctggtgggagtgtagcagtgaggacgaccagaggtcactcctgtcgccatcttggttttggtgggttttacctgggttctctactgcaaacctgtttttttatgacctgtatctcacgccgaccttctgtctcatcctgtgacttagaatgccttaactctctgggaatgcagcccagtagatctcagcctcattttactcagcccctattcaagatggagttgctctggttcaaatgcctctgacaaaaagacaaatacttagctgaggtaccttcaagaggcaaattcatagagtcagaaggtagaatggtggttgccaggggccagaggggagggaaacggggagctgttgtttaaagagtgtagagtttcagtttgtggtgacggaacgttctagtgatggctgcacaacattgtggttgtacttaatgcaccaaactgaatacttaaaaatggttaaaatggtaaatttcatgttatgtatgttttaccataatttaaaaataaaaacaggccgggcttggtggctcacgtctgtaatcccagcactttgggaggccaaggcgggtggatcacatgaggtcaggagttcgagaccagcctgaccaacatggtgaaactccgtctctactaaaaatacaaaaattaaccgggtgtggtggtgcacgcctgtaatcccagctactcaggagcctgaggcaggagaatcacttgaactggggagatggaggttgcagtgagccaagatcacgccactgcactccagcctgggagacagagtgagattccgtctcaaaataaataaataaataaaataggccgggcgtggtggctcatgcctgtgagtactttggaaggccaaggcgggcggatcacgaggtcaggagttcaagactagcctggccaatatggtgaaaccccatctctactaaaaataaaataaaataaatagctgggtgtggtggtgcacgcctgtaatcccagccacttgggaggctgaggcagaagaatcgcttgaacccaggaggtggaggttgcagtgagccgagattgcaccaccacactccagcctgggcaacagagtgaggctccatctctaaattaaattaaattgaattaaaaataaataaataaataaataaataaataaataaataaataaaacgtgttcaaccgggtttgacttagtttttcctcagacttatttgactgtggtcccctctgatcagaagaaaaaaatgctttaaagtgtgacatatatcacatcctttccatgttagaaaaacacactttggggaacattcccacatacttgggggtggggaggaagaatcaacttcctgagtgtattaactcagagaaatattattagaaatggtggctgagtttttatttgggggaattttgggtcaattcgtcttctctgagcaagcctaatgacgtcatttctatgaatggatttggagctttgaaacactttagcctgaaaagaaacgtctagaacacagccggctcaaatcggagaccaattgacttcaatgagtcttaagtacacaatctgctgcctttatgcagaggtttgggaattattttggaaagataggaggttcctcctattgggaggcttccagtcagtatcttagatctctaagtgctgaaacacttgaagctgagcacagggcattgggtgagtaaagggaaagtgaaatagacagccttgggcaacacatttgtccttccttcctctgccccaggtcctagactaatctgggtctaaagcaggagttgcttaagagactcagcccacacagtggcttcactgtctttcactctgtctgcagatctgggaatcagagccccctctggcttctttggccaccatgtggcccactttcaggacaccccgaacctgccttgtcactaatccctgcgtccagagctgatgtgcgcacccctttccttctctccaagacccccattcctaacagcattcctgcccctctttagacccctgggctggcttttgctttggttgcctttctcagttccttcttcagaagcctctctaatgcctcaagcccttcactactcaagagggcgcccttgaccgcctcggcctcccaaagtgctgggattacaggcgtgagccaccgcgcctggccattttttttctttttgagacagagtcttgctctatcactcaggctggagtgcagtggtgcgatctcagctcactgcaatctctgcctccggggttcaagtgattctcctgcctcagcctccctagtagctgggattacaggcactcaccaccatgcccagctaatttttgtatttttagtagagcaacctctgttaccgcccttgtggataaagactcccgggtcccatcctcattctctcttccccactactcagggattggaatgctgccttgaaatttcagcattaggcccccttttccatgccagcgtattgtttcttctacttgaaaagtacatgttccttataaaaacttcaaacctcatagaagtatctttcccacaattatctcttaggtaattgccattaacaatggacaatatatttttttagatttttctttttctattcatatatgagtacacgcgtttgcattttagcaaaactcctgctatacctactgttttgcagcttactttccttcccccacataattatgcaactggggcatctttccatcttggcaaggagagctctatttcatgatttaatagctgtattgtatttcattgtttggatgtaccatgatttatctaacggatcccattgatggacaactggagtttttccagctttgttattgcatataatgtagacatgaataatcttaagcacataaatctttgcacaattgcaaaagggtttctctaggataaattcctaggtagagtagctaggtaaaatggtaagaacatctttaattttaatagacgttgccaaatcatcttcctaaaggacttaaccattttgttcttccaccacattgtggaccgaggtcggttcccttcacctcgtcaatactggctagctgttctttttctttttgagacagagtcttactctgtcactcaggctggagtgcagtggtgcgatctcagctcactgcaacctctgcctcctgagttcaagtgattctcctgcttcagcctcccgagtagctgggattacaggcactcaccaccacgcccagctaatttttgtatttttagtagagatgaggtttcagcatgttggccaagctggtctcgaactcctgacctcagatgatccacccacctcagcctcccaaagtgctgggattacaggcatgagccattgcacccagcctggctagctttttaaatttttaatactttgatagatgggaaatgttttagtttacattttaaacatttgttttgcaggtcttcccattgcaaaactctagggtgatactgattacttgaggttgaacattttcatatgttaattggccatttgtatttcttctctaaatttctgcctggtctcctgctgatgatgcacttgaatttcgcattgctgttctctgcctgccaggatggaaaatctattccttctcttcagacctgcccttccctgccccaaggctagagagtgatgtccagctcagaacttggggtgagaaagatccacgttgactcccaactactccactagtatgtgaccttagacctctctaggtcccagtttcttcaaatgaaaaccggatttgggggccgggtgcagtggctcacgcctgtaatcccagcactttgggaggcccaggcgggcggatcatttgaggtcaggagtttgaggccagcctgatcaaacagggtgaaaccccgtctctactaaaatacaaaaaaattagtcaggcgtgatgatgggtgcctgtaatcccagctactcgggaggctgaggcaggagaatcgcttgaacctgggaggcggaggttgcagtgagccgagatcgtgccactgcactctagcctgggcgacagagtgagactgtgtctcaaaaaaaaaaaaaaaaaaaaaaacagctggacttggagccggaagatcagaactgttaggctctatcctgtgttctcaggtaccctgaacttgcttttagagtatttatattttattatcattttttgtttatatatcgatttctcttattagactctaaactccttgatcacaaggaccgtattatccatcctcacatctttggtgtccaggatataatggtgttcactcaatattttccaatacatttaatttttgagaattttattgactttttttttttaccataagaaaagctgcgttctaggtgccatgagaatacaaaaaatatttaaaatgtagttcatatcttagttggggagataagctcgatcactcattcattgagttattcaatatatccggagttatctaagctccagccagcttggcagtatctgaaaagataaagtcaagttgtgtaccccacacttaagtggcttccagtctagtaggggagacagatataaaataaacacaacataatgggatgcacacaatcatatagaaatcatataataattattaaaaatatatagtaaggctgggcacagtggctcacgcctataatcccagcacttagggaggccgaggcagatggatcatctgaggtcaggagttggagaccagcctggtcaacaaggcgaaaccccatctctactaaaaatacaaaaattagccaggcatggcggcgggcgactgtaatcccagctactcgggaggctaaggcaagagagtagcttgaacccaggaggcaaaagcgagctgagatcccaccactgcactccagcctgggtgacacaggaagagtctgtatctatatctatatctatatctatatctatatctatatctatatctatatctacatctacatatgtgtgtatatatatgtatatacatatatgtatatatacatatactatatttttactatatgtgtgtgtgtgtatatatatatatatatatatatagtaaaaaataaataagtaaaaacagtcacagaagaattatcacaaagcagtgcatgacttggtagttgccaagtgggagtaaagctcactttgcacttaatgtgttctaggagtcactaagggcataggaagaagagacggctggaagggggcttcccagtgcaatcaatgagtggtcacgtgtgtgtcagtacagcaaagaccaagaaggcttgcaggaaaaacttgttgaattctctttgacctaatgtcacccacattcatttaactgtgaagctcttttcctcccactgcttagcatcctatggatctatcattctttaaaatcgttatgggaaattctggtgtagataccatttgtaattagatagtgtctcttaacctctttggaacataggccttttgagaaatggatggtcggaggggattgtgcacaattctgtgctcttcgaagcccaccgaagacccgcctccatgatcagggaaagcaaagaagggaaaaaaaaaaatcccaggtagtgggagtatctgtgtaggtcgagatagaagagggtagaagatacggagcttgttcactgccgggcagttgactgtgagggagagactgtgtggggagggggacaccaactgtggaagacctcaaatacttggactacttggtgtagaattcacgggttttttgtttttgtttttgtttttgttttgagatggagtctcgctctgtcttcgaggctggattgcagtggtgtgatcttggttcactgcaaactctgcctcccgggttcaagcagttcttccagcctcaacctccgagtagctgagattaccggcacccaccagcacgcccagctaatttttgtattttttagtagagatggggttttaccatgttggccaggctggtcttgaacccctgacctcaggtgatccgcctgcctcggcctcccaaagtgctgttacaggcgtgagccatcatgcctggccaaattcacggttcttgataactgatcaactgtgaaagtcaagggaagccgggtgcggtggcttatgcctgtaatcccagcactttgggaggctgaggcagacagatcacccgaggtccggagttcaagaccagcctggccaacatggtgaaaccccatctctactaaaaaatacaaaaaatagcccagcatggtggcatgtgcctgtagtcccagctactctggtggctgaggcacgagaatcgcttgaacctgggaagtggaggttgcagtgagtcgagattgtgccactgcactccagcctgggtgacagagcaagactcagctcaattaaaaaagaaaaaaagtcaagggagatgccccagtcaaagataactctgccaacagacactggagtcatagttaggattatttacagaaagaaaatcatggagctaaaacttcaacacttcaaaacctatgttatgatcatgttgaaatgccccacgttgcctttattaactagtgctcagtctcccaactgaaaactcattgtaagaattgaatttgccatctaaccgggcatcctaccttgaatggttaaaaatcagatttgtctgatttctaattttagaaggaaccaggctgaccttcattccgctgttgctaactggagccctgttacctgggtgactagatttacaatatgtcagtatgcaaataccatctgcccaagaggagaaaggaagcaaggccttcttcctctaggggttgtcagcagttctggaaacgtcttcctctgggaatggggaggaaggcatgcccaatagaaggagaacagggaagaagatgtgctgattcgtttctggagcctctcccttgttctcttcccacagaggagtttgtggtctgccttgtggacagtcctgaatgtatatcattaggatatagacaggaacttagattgtacatttctcctggtagagtgagcaaaagaagtagtatatatcacttcagtggatcacaaaacacttagattcagataactggaatggcttaatgaagactatgaatatgcgattcctgcctccccaaatgccattaggaatctaatttccaactgataagagagtgtgggctgggcgtggagccggctgcctttactggacgaactctgaaggaggatgaagagaagtggatattccggctcattttcctacacttgaggttgactgggcaagcggaagggatttttctcccacagaatatctatattcagcacttgtcctgagtattgtttcaggcgagggcttggaatcacatttggaaacattcaaatccaaaggcagggacgttctgctttccttttcatgaaataactgtcacatcagctgtcagctgcaggaatctctcccacccacgcattttgtgagtccaaattaggtggactaattaattgtaatttttactttcaagtctcaaggactttgatgggcggctgtgcttcctttcatggttgtgtgcaggaatttatgtaggaggaagaccttctaggagcaggattgaggatctcaggctcttggcttctgattttgtacccctgggttacttcccctgtgacctctcctctctttgctctccttggctctgctctctcatctctttggtaaaaaagaactcttcttaccatcaacctgaaactgtcagcaacatgcaggagtgagcagtcactaaacttaactgtgacattttcatccacctagcctttttatctgcatgtcaaacaagtggccaaggagattaatgcctgagtgcatgctgcagctagacgggctgggttcaagtcccagctctactacttactacctgggtgacattgggcaagtgacttaacctctgtgtatcagtttcctcatttgtcaaatagggatttaaaacgctaccttcctcattgtgttgttgtgaggattaaatagtataaatattttagaactgtgctgaacctatagaagccagggctctgtatggcagcttttaagatgactctgtcatgcatctgcaggggtcctagtgaggtagtgaagttttgctgtgagcaagtagatttccagagcttgcttgcaggcagtgacctccccgttctttcttgccatgctagtttcttttttgagatggagtctagctcagtcgcccaggctggagtgcagtagcgccatcttcactgcaatcacctcccaggttcaagcgattctcccgcctcagcctcccaagtagctgagattacaggcgcccgccaccacgcctggttaatttttgtatttttagtagagatggggtttttgccatgttggccaggctggtctcaaactcctgacctcaggtgatctgtctgccaaagcgctgagattacaggcataagccaccacgcccagccatgctagtttctattcatgcacagatcaagcctaattttccatgtggcaccccccaccaacaacagtaccccatgctgctctgttcctaccccttgcaccctttctgtcaatgctgtgtaattagcacatttggacacgatgtcttagcttctcactctgattgtaatgtgaagttcagctcttcattgtccttgaggcataatgaaaagatgccatgtggctggagagctgcctgcgatcgttgttcaatggatgatgtggccaagtacataaaacagtgacttggacaaccacacttgtcctttagcttactcttgaagtcacttattgctttcttattgcttatggctttcttgttgctttcttattgcttatggctttcttgttgctgtacataacttaaaactatcaaaagaaaatatgagatgttgcagctgctatggaggaaagtctgacagttcctcaaatggtcaaacatgttgttaccatgtgacccagtaattccatatccaagggaaatgaaaacatacgtcctcaaaagactcacccacaaatactcatagcagcattattcataatagccacaaggtggaaaccacccaaatgtccatcaactgatgaagggataaacaaaatgtggtatatccatacaatggaatattattcagtaataaaaaggaagtactgatgcatgctaaacatgaatgaatcttaaaaacatgttaaatgaaaggagtcagtgacaaaaggccatgtattgtatgattccattgatatgaatgttcagaatggccacatccatagaaacagaaggtaacttagtggttgctgggactgggaggagaagagaatcagggatgactattagtgggtatggagtttcttttggagatgatgaaaatgtggaattggatagcggtgatgatttcacaaccttgcaaatatactaaaagccaccgaattgcatattttttttaaaaaagtatgggaaacatctatatgctcaactacagagcttaaagtcatctttaagattactttttccagcgtagctgtcacctaaaatagaataaaaagtgacttgatctgcaaggaaaacatgaaaaatgcaaatggtcaagaatggctttttcaccccaaattgttgaatataaattatatacatgcaattcgtaagtaaacgctgtaggactcggctgccttctatgttgtgattctgtaatttgctacattcctggatgggccatcaaaataatactgaaaacagcttctataacaaatagaagtgctgtttcaggtcatgcctaccaccactcctgggttccctaaggtactaattcatagctacctctttgtggtgcccttacaaagagtgatttaactgtttgtaaaggtgtctggacctttttgacattaaagagatttactgaattaaacttatgtttgcaaacagaatatttccaggggatgccttccagccccctaagaattaaccatcttagtttatcagtgtttaatcaggaccctactgattgactcttctggtttaaataaataatggggttgaaatctctaccagggctgtttcagtacttatttggaagaaggatgtgaaatacccaagctccacctaaaataggctttgcaagaataagtgatccaagagagaacctacagttgactttaaaacatcctgtaatcatgtcacacctgttaggatggtggttatcaaaaaaacaaacaaacaaacaaaaaaaggaaaatgatgggccagccatggtggctcacacctgtaatcccaatactttgggaggctgaggcaggaggatcagttgagactagcctgggcaacattgcaagacccatctctacaattttttaaattacccaggcatagtgccgtgtgcctgtagtcccggctactccagatgctgaagtgggaggatcacttgagcccaggagtttgaggctgcagtgagctatttcacaccactgcactgtagcctgggtgacagagcaagaccctttccctaaaagtatttttaaatgtaaaacaagtgttggtggagatgtggagaaatcagagccctcctgcattgctggtagggatgtaaaactgtggaaaacagtttggtggttactcaaaaagttcaacatagaattaccaaatgattgagcaattccacttctaggtctgtactcaaagtaattaaaagcagagactcagattcttgtatactcatgttcacagcagcattctgtttttttttttttttttttttttgagatgatgtcttgctctgtttcccaggctggagtgcagtggcacgatctcagctcgctgcaacttccgcctcctgggttcaagcaattctcctccttcagcctcccaagtagctgggactacaggcgtgcaccaccacacctggctaatttttgtatttttagtagagatggggtttcaccatgttggccaggctgttctcgaactcctgacctcaagtaatcctcttgccttggcctcccaaagtgctgggattacagatgtgagacaccatgcccaggcagaagatagattttttttaaatgtagcaatttctggaaatataccaaacttactgttttccctgtcttcactgacgacctcaggagagcaggagttgacacccatttgctttcctcaatctgctatctgcttctttttaccaaggaggaaacactcttaggccaactatggcctaagaatgaatggtgcctccctgcaaccagccatacaccctctctggctacaagtgccatccatgcctctggaacctggagcttctcctaagtagggtgagcaaagatgctggaactttccaagtctcaatctacatatacaatccacatatataaccctctcccagccttgctaggtagttaccagaaccccaaaaccacttgccaagccagtcagcatttaggtaagcaaaggagtccagtgaccctcaaatatcactgagatcttgtttgtctaggcatgaagtgccttgaataactctttcaagacattaagaactcccgctgttcaattgtacctgaagcagcaagtgcttctctttgcatttcctttaccctctgttctcagaaggtctcaaagatgctgaaactaattgctgtcattcctgaaagatttctgcttttaagtggtactgcggcttcccttgatgctaccagccgttttcattaaggatttcatgaagggttgatgggtgcattaggcttcacaaacaacggttcttttcatcctggaaaggccttgctaccttggtagtggatggacctctctgctgcgaacatctctgtttatggggctaaggttacagagatgacaaagaggtcacaagcggatggcgcaggatatgtgtcctgggaaagctctatcttgattttccctctttttggtcttgtgattgactgtgggtttatgttctgtagtaaacacaagagccttgattgcttactaaaggtcagacttgtcagcaaacctctccattaacttgagttgcgatcggtttcacatttcctggcaaatcgtttgagagctctgatgaatgcatcagtttccttcagtcttctgtcttcaaggcagaaacgctcaagaaatccccctctttgccagacaccaagtgtatcttgtttgcagctctgcctctagcatctacagggcttggcatacacgtgaaatgcatgttgagtgatgaacgggagcgcacaggactcttaagaaccgagaccgtccccacagccaacgtatgaagaaatcccatgttctgcttctagagccaactgcccttgtggtttcgagttgagttctggcagttcctgtctttgctctcttaatcattcttcatgggctcccactaatggctaatttgctcagcttgtcatttataaatacaaggacatgacacccactgccttagccagtgcttataaagtaacctgtaagtgctgcatgttatcatctcggcttttcaatttatgagtcaagtgaattctcggggctagaacatcacccctaaaagcgagtcagtgttggaagaagcagcaaaaatatacatgcactcttacttgcatagactatgaagactattgttactctcctgtactcagtcaagtagattatgctcctccatggtcaagtacccttgaggcgatttgcacagttttgcagcaacagcaggatagaggttgtgctggtaccagcaggaagcatagcctgagcccttcccttggatttcagttgctctatttctattcagttcagtccagaacttaggacaggttaagcatcagcgtccaatacagtttatattagtttgtcacaaaagggggattttttgaattaaatgttgataacccagcttcttaaatctttttatcagttttttcattcccataccctggcataatgacacaggtattacgtaaacaagacacctccgagggctgcttataaaaactcaagagaaaagataaatatgtgatgatgcactgatatcctgaaatatgagctgcaggtttgtattttctttgtgggatcggatattggttttcatggtttattgaccaggctgagagacatctgacaaaacacccaagaactttacaccttttttttttgttattattttttaaccttcctgtctacatggagaaatctacacattgaatcacagggcctggaagactggggcttagccagtcatgttcttagcttgggcagaacccaaatcagatccagctgttggaggtaaaaatacacgctgctttcccaaggaaaaagcaattggaattggtctcactgtagagttactctcgggcagaacttcgggataaggagcaactggagacggtcgactgtgaatgtgatgttcatgtgacattcatgttcattgaggaatgtgttctcattgagaccggatcagaactcatttgggttcagttaatgactctttcctttctgccgggtctttgtctgcaacattgggcacgcagtcagtacctcgttgtgtgggagcatcaccgacaggaatcctccagaatggtcatatattaaagacctctcgggctgggcatggtgattcatgcctgtaatcccagtactttggaaggccgaggcaggtgcatcacctgaggtcaggagttcaagaccagcctggccaacatggtgaaaccctgtctctactaaaaatacaaaaattagccgggcgtggtggcacacgcttgtaattccagctactcaggaggttgaagcagaggaattgcttgaacccaggaggtggagattgcagtgcgccgagatcacaccactgcattccagcctgggagagagagtgaaactccatcccccaccaccaaaaaaaaaagacatctaggcttagggcacggcaaacaaagaactcccctggcatggcaggaatcagggaatctcatgtaacattcattgtttctccggggagtcttttcatatttctcccgtcttctaggctcaatacctttcaggaagcttctaaaccaaaggttcatcaaatagaaataattttaaaaattatttcataataaactttaataattttttcataatcataaagtaattgttagatggtttccttgaggcatgagccatactcactgaaaaatgacaagttctgagcctttttaattgtgatcaaatatacatatcataaaatttaccattttaatcttttttttttttttggaaaatgaggtctcacttgcttgcccaggctggagcacagtggtatgatcatagctcactgcattgcaccctggacctcctgggctcaagcgatcatcccgcctcagcctcccgagtagctgggactacaggcgtgtgccaccatgcccagctgagtttttatttttttgttttttgtagagacaccatctccctatgttgtccagggtggtcaccaactcttgggctcaagctgtcctcccacctcagcctcccaaagcactgggattacaggcatagactaccatgcctggcccactgtaaccaattttaagtgtatatttcagtgacattcagtacattcacattgttgcaaaaccatcatcaccatctacctccagaagcttttttaccatcctaaactgaaacgctgtaccctaaacactccattacccactctttccagtccctggcagctaccattcgactttctgtctctacgaacttgacacttctagctgcctcgtctaagtggaaattctcaagctttttataatacttatgggaagtagtcaatctgactaccgtctaatgaaatttttacataaggaaaagatagttttgagcagatggtcagatttcctttggttttggcattgtacaagtatatggcagatgcctcattctcttatactttctggaacccgcagcataacagggatatgaatgaaacagatctgcaagtcacagtcagacatgtggccaactagaaggagcagtggtgagggcagttggtgtacaggtttattatacaatttatgaagcattttaatttttaagtttttttttttttctcacttgattctcaccatgtcttgcgaggtattctattagttccattttaatgataataaactgtggctcagagaagtaaatcgtctaaggttacaaagctagtcaatggtagaatcaggacgctggcttcacattttcatttttaaaaccccagtgctttccatcacagcccactgtgaacaattatcacgtctctggaggcccaggtaatagccagtcctcaggaagggagggcctctccaaatgcaaccctaattactagtgctccacctcaccagctcagaaatacatggaaaccgtttttttttttttttttttttttaattgagacagagtctctgtcaccaggctggagcacagtggtgcaatctctgctcactgcaacctccgcctcccgggttcaagtgattctcctgcctcagcctcctgagtacctgggattacaggtgcctgccaccacgcccggctaatttttgtatttttagtagagatggggtttcaccatcttggccaggctagtcttgaactcctgacctcgtgatccaccctcctcggcctcccaaagtgctgggattgcaggcgtgagccactgcgcccagcctaaattttctaatagccacattttaaaaagtgtgtagaaagaaacacataggctggctcatggtagcttacacctataatcccaaaactttgtgaggctgtggcgggaggatggcttgaggctaggaatttgaggccagcctgggcaacatagcaagataccatctctacagaaaaaatacaaaacttagctggacgtggtggtgcctgcctgtagtcccagtgactcaagaggctgaggtggaaggatcgcttgagcactgggggtcaaggctgcaatgagctacggtcatacctctgcactccagcctggatgacagagcgagaccctgtctctaaaaaaataagaaagaaaaggaaaaaaaaaggcaagtgaagttaattttaaaaatatattttagttaacccagtatacaaaaatatcatttcaatcaacataaaaattattaatgaactattttgcttttttttgtagtaagtcttccaaatctagtgtgcattttagacttaaacagcactcccaagtcagacgctaaattttcattggcagtacttgatctttatttagatttcataaaattcccagttgaaaaagtagattcacatacccaaagtgtttcaaacatatatgaaggttttcttttttttttttttttttttttttttttttttgagacggagtctcgctctgtcgcccaggccggactgcggactgcagtggcgcaatctcggctcactgcaagctccgcttcccgggttcacgccattctcctgcctcagcctcccgagtagctgggactacaggcgcccgccaccgcgcccggctaattttttgtatttttagtagagacggggtttcaccttgttagccaggatggtctcgatctcctgacctcatgatccacccgcctcggcctcccaaagtgctgggattacaggcatgagccaccgcgcccggccgaaggttttctaataactgaatcaagcaccagtcttaaatttaaatgaattaaaatgaaagaaaatttaaaattcaatccctctattccatgggccacacttcaaaggctcagtggccacacatagcaaatagctttggtcctgggcagaacagatctagatgaacagctgagggtggcccagactggacccagccgtggaatagaacaacggtctgcaaacttatttctataaagggccagataataaatattttcagccttgggggttacacagtctctcaaagtattcaactctgccattgtaaatgaaagcagccatagaatgaatgagcatcgctgtgttccaataaaactttatttacaaagcaggcatcagcctgcatgctttgccaaccattagactagaacatttgtcctagggccttagctgtgctgtgggattaccagaaaaagagacagctctcacctctagctttctgagatgaggttgtcaaaatctggactcactggatctcctttcctgtgtgtaattagaattttgacaccacttggcatgaagcaacggtgggccagagttctgcgtcatttatccttcaggtgctctctgcagtggatggtttgtgcctcctgaagcaattgcttccctgtgctttgaggtccagcagaggtaacagcggagaaagctggaagaaaggcttcaacaaaagcattaatggtgatgtgaagaatgcaggaaactcccaagaaagccaaatgatatcactctctgcttttccaacatagccagtgtgaggcaggaatcacacacgtttcacagctgggtaaatatgtgatttcacgtgaaatcagagggacaggtgtttctctgtgcttgttaggtgatatggcgtccgcccattttgatggtaaaggccaaagtaaatataaattctgtttcctgacctggggccttgaggtccccaggcggggattaccaccacccaatttgggaatctacgttgcaaagccatggttcccgctgttcacattgtgacgtttggaaatggtattgggactaatggagggaaagaaagaggacaggaagggagggcatagagattggttggtaggaagatgacccccactaggtgctttagggtagggggttatggaggctggctttgcagaaactctgggacgcagcagttggggaagggtgaagtgaaaatcagtgatagcttagagctctgctgaccctagaactttggatccagtatttcttcaggcatggatgatgttgaaggtattgttggcactcatttgataatcccttactgtactcagaagttttggcttggggttgcctttttaattcaaggttcaagattaaatgacttggctgggtgtggtggctcatgcctataatcccagcactttgggaggctgaggcgggaggatcacctgaggtcaggagttcgagatcagcctggccaacctggtgaaaccccgtttctactaaaaaaataacaaaacttagccaggcatggtggtgtgtgcctgtaatcccagctacttgggaggctgaggcaggagaattccttgaacctggggggcagaggttgcagtgagccaagattgcaccattgcactccacctgggcgacagagagcgagactccatctcaaaaaaaaaaaaaaagttaaatgactggatggtgccccatgtaagagtttgcaaaagttcaaactagtgaaactgctgagcttcttcagtacattatgcaactctgccttgcctccaattttgcagctctatcaagtgtacagcgtggtgtgtggggaaagatctgcatcccatgatgtttttgactatggaggtaattatttggagtagctgttctgatgataactcacggaggttcagtctgcagcatggaactgtctctagtcatgattgcctgtaatgatgattacccaaactctggaattataacaatagattttacaaagttagagcataattgctccaccattccttacatgtgcacagattaaacaactttgatctttcaatcagatttttgttactcatcttctgcaatagcaaaggtcagaggcagtagctttctgccacctccctcccctctttttaaatcatcacgaggcctagatttttaaagcatttaacttggtaaagaaataagggctgaagttgtgtggactagaatgagtacaggcctgtggggggtcagaatcccaattctgacatctagaaactctgtaacatacagtcttcaacctgtctgcaactcagcttcctcgtctgtcaatactcacttgtctgaatcattgagagattagaatgaacataggcggccgggtgtaatggctcatgcctgtaatcccagcactttgggaggccgaggcggatggatcatgaggtcaggagttcgagaccagcctggccaacatggcgaaaccccgtctctactaaaaatacaaaaattagctgggtgtggtggtgggcgcctgtaacctcagctactgaggaggctgagcagagaatttcttaaacccaggaggtggaggttgcagtgagctgatatctcgccactgcactccagcctgggagacagagcgagactccatctcaaaaacaaaaaaaaggaatataggctgggtgcagtggctcacgcctgtaatcccagcactttaggaggccaaagtgggagaattgcttaaggccaggagttggagactaacataatgagaccatgtctgtacaaaagtaaaaaaataaaaattaactgggtgtggtggcacacttctgtagtcccagctactcaaggggctgaggcaggaggattgcttgagcccaggaagtcgaggctgaggtgagccatgatcatgccactgaactctagcctgggtgacagagtaagaccctgctgcttttaattttttaaattatttattttatttacttagtttgtttttgtttttgtttttttgagacaaaggctccctctgtagcccaggctggagtgcagtggcgtgatgtcggctcactgcaacctccacttcctgggttcaagtgattctcctgtctctgcctcccgattagctgggattacaggcgtgcaccaccacatccggctaatttttgtatttttagtagagacggggttttgccatgttggccaggctggtcttgaacccctgacctcaggtgatccgcctgcctcggcctcccaaagtgctggaattacaggcatgagccgctgcgcccagccagaccctgtctcttttaaaagaaaggcaaaagaaatataaagcacttaatcagtgccttgcactaatgggcaatcaataaagtgatgctgtatcatcatcatcaattctacgatcaattctcaggctttggaggctttagaatctttctatgtctttggatgttgtggcctttattcaacatacaagtttgtttggagctggtggtcagggatatggtattttcactaagttagggatggagctttgtaagaaatcagtataaaggaggaaaaaagaaacaagcgtcctaaagacagaacatttacagctgagcaagtgctgatggctgccttcaccacgttctgctgcagcggttctcagcatttatgtgcatttctgaaagattcccactcttttctccccagagtctgaatggagaaggtctggaacaacctgagattcagcatttttaggagtgtctctggagattttgaaacacgtggttcaaggactctctgtctcttctccctcccccaaacgagaaactgctgcttgtgtctgagagtcaatacgagatttaaaaacagcaacaaaaccactgctcctggaatggcccagttcccatggccacgaccagcaaagtgggcctgatttccttaggaggggaagaagtgacggctgcagagcccttgaccatctcggtgtctgggctcgagtgtcccgccacccccagcgtctgcaggtcacccccacactgacgccgtctcagtgagctaatgccagtgtctgccccgcgccggctcattcagcagccactggaatgatcaatgaggccggccgcccagccctccaccggctgttggtgaatcagctgcctcggccattcccatctccactgagcaggaagcactcgagctgagcccagccagggctgactggcgtctggctaatggcttttctgtgtcatgcactgaccttgatcccatatgtttttcatacgtgagtgggttggagtgcctgaagatggtccagtggtggaaatagctcttctgccaagccccttaccgaggtcctgggcagtactttggtttagaggtgtctgcttctgaagcaggatcggtgcttttgtttaaattgaggtgaaattcacataacataaaatcaaccaggttaaagggaacaatcagtggcatctagtgcattctcaacgttgtgcaaaaccacctctatccaaaaacacttccatcgctccagaaggaacccctgcacctgttgcatgagttgactagggctgctgtaacaaagtgccacaaactgggtggcttcaacaacagaaatttggggccaggagcaagtggctcatgcctgtaatcccagcactttgggaggctgaggtgggtggatcatttgaggtcaggagttcaagaccagcctggccaacatggtgaaaccccgtctctactaaaaatataaaaattagtcgggtcgtagcggcgtgcgcctgtaatcccagctgcttgggaggctgaggcaggagaatcacttgagcctggtaggcggaggttgtggtgagccaagatcgcaccactgcactccagtctgggcgacagaatgataccctgtctcaaaacaaacaaacaaacagaaatttactgtctcacaattctggaggctagaagtttgaaatcaaagtgtcagcaggcttggttccttctggaggctgtggggtgagggaaggatccggttcggacctcaacccttggcttttttttttttttttttttttttgagatggggtctcgctctgtcatccagactagagagcagtggtgtgatctctgctcactgcaagctccgcctcctgggttcacgccattctcctgcctcagacttccaagtagctggaccacaggcacccgccaccacacctggctaatttttttgtattttcagtagaggtggggattcaccgtgatcgccaggatggtctctatctcctgaccttgtgatctgcccacctcagcctcccaaagtgctgggattgcaggcgtgagccactgtgcctgaccaacccttggctttatagatggccatttttctctccacatcatcttcctctatgcctgcctgtgtccctgtctaagtttccctttattataaggacaccaggcattttggataagggcctaccctaatgacctcattgtaacatgattacttctgtaaagaccctatctccaaataaggtcacattctgggttactaggggtcaggacttcacagtatgtattttgcggggacacaattcaacctttaacaacattaggcagtatcagtactttgttccattctatggctgaataatatcccattgcatgtaaacatttattttttgagccccaagtacaaagcaactgtcagtgaaatctccaccccctgggtagtgtgtgcccatctgtataaggtggcatattgatctcacaggtagagctcacaaatctgcaatgtgtaaactttttcttattgtcttcctccttgaaagagtgttagcctttacgagcaaaagtcaaagcagtactggactaagggaagagaagtcaagcttctgatcctaaaattaattttaaaaattgatttcaggctgggcactgtggctcatgcctgtaatcccagcactttgagaggctgaaatgggcaaattgcttgagcccaggagttcaagaccagcctgggcaacatggtgagaccctgtctctacaaaaaatacaaaaattagctgggcgtgctggtgcgcacctgtagtcccagctgctcaagaggctgaagtgggaggattgcttgagcctgggaggcggaggttgcaatgatctgagatcacaccactgtagtcccgcccgtgtgacagagtgagaccctgtctcaaacaaacaaaaaaaagaggatttcatctttaaattttatttttccttttcctggtcttatccccagtgctgcccacttcctgcaagcacaggtgcacacacacaggtacgtgcacacatacgctcacgttaaaagcgttttcatgtgaccgttctggagaggggcgtggcacagataggagacacagtccttcgagaagacccagacggcagcttgcttccattgtcatggttactgggctcggtccccagggctggctgcagaccagagcctttcagagcttcttcacactcccgtccctgctcctgcctcagaatgaaagagaaaccttcgggcacatgtgtcttctcagctgtgaaactaactgcactgttgacttgtgcatttcatctgcccccttaatttaaaatctatttctgtctcttatgcagacagacaggggacccgcatccctgcagattgttggggaataaccccgagtcctcattagtttgttgcagactcaggccccactcccccatcccagaggcgtcggtggtaatgacccagggtctgtctctaggaaggatggcagcagggtcgcatcgtcctgcgtcctgactctgagcagggttgtacctcatgcaaaagttgtttaatttcctccttcctctctccccctcccctctctcttttccatcaaattcgttttgccacttcgaaagtccactgggggaagaaatgcctgctggtcccagggttttcagagaggcaggaaggcagatggaacagctcatacatgaaaaaaggacagaaaatgttcatatagtatgttgctccacatgattattttagggtaagacaggtgacttttgggtccttggactggaaggctccacactcttcatggaattggatgaaaaggagttaaaagtactgtaggtggtcctcggagaggagcggccttcaggggctcagattatgagccttggctccactcatgggggagccggggcctctggagctttgaaaagctttcaggtgattctaatatccagccacctttgagaaccattgttctaggggacagaggcctccaggagagttgagcattttgagagagggaggatagaagaaatagatgatatctaatgctccctgttcagcaattttgctaattaggcagaaagcaggggcagaaatcacacaccctcggctgtcttgggccaaaccaagcaggactttagctccatttaaccctgtagaatgcaaagggagactccagtgtcccccttcccaaggtttggtcagctgccaaagcttacagactgccagccacccggccgagcatttgccaaggtgatgtaaaatattcacgggaacacgccgtctcgatgttctactcacaactggttctctccctagctcccgaggaaaagtaacatgaggcccatgtggctgccttctcttctcagcagaaggtgctgatgttattagtggcttgccaagctatggttggagggggatgtcaggggcacgctgtggggctgacctttctgtctctgactctgttttgtagtacaaaattggacagctgtacatgatcagcaaacacagccatgaacagagtgaccggggagaaggggtggaggtcgtccagaatgagccctttgaggaccctcaccatggcaatgggcagttcaccgagaagcgggtgtatctcaacaggtgagtcatggcagcctgcgttctgcacagaagccccctcccacctgaccccatggtgtgacagtggaggcagtgggtgtctgggatgaaaaggtcacttggaaagtaactacgtccaccgtctacgaccaccaatctcattgtttttgaaaacagaatctgcccgagcgaggtggctcatgcctgtaatcccaatgtttttaggaggccaaggtgggaggatggcttgaggccaggagtttgaggctacagtgagctatactcacagtactgcactccagcctggggtgacagagcaagaccctgactgtaaaaaatattactacataaaataaaataaacgaaatgaatctccccctccccaccttgcattctgcaaaatcgtcctcaactgcgtttccattaagaggagctttcggctcatctttcccacggctttgatgacgtgttacagcgaaatgtgatcttaagaattcaagagcctggaaggtggaggctgcagtgagccatgatcatgccactgctctccagcctggccaacagagtgaggcccttgaaaaaaagagaattaaaggactttgtctcatcccttggttcagtgttagctgtaggaaagagacggtgctgcctatatgctgtggacaagtaagtgctggaggtggcaatgcaccttttggtctcagtaagattttcatttactactggtgaccacttgggtgtccgaaaagggaatgacaaaacaaacagtcacctgtgaccaaagtggttaagatggcttccacttctcaagtggacccatccttcccaaggtggaggttgtcactctccttttggaagggaaacacatcaaggatgacaaaatagcactagtcaagcgtgccgtttctgctttgcaaaatatattctttaatctcttgcttttttctttttcttttcttttctttctttttttgttttttttaaagacagagtctcactctattgcccagacgggagtgtaatggcatgatctctgctcactgcaacctccgcctcctgggttcaagtgatactcctgcttcagcctcccgagtagctgggattacaggtatctaccaccactcctggctaatttttgtatttttagtagagacgggattccaccatgttggccaggctgatcttgaactcctgacctcaagtgatctgcctgcttcagcctctcaaagtgctgggattacgggcatgagccaccacacccggcctttcttgctattttcttactatgaatggcgtaatggattattagggcttgtctgatcttctccccatcctatactcctatccagcccatttcttcctttcagttcctttctgaaaccttcggaatatttgtggttagatgccatatgaaatatatcttattggcaaagtgtggtggctcacacctataatcccagcactttgggaggctgaaggtggtagatcactttaggtcaggagttcaaaaccagcctgggtaacatggcgaaaccccatctctactaaaaatgcaaaaattagctgggcatggtggtgcgcacctacagccccagctacttggaaggctgaggtgggaggatcgcttgagcctgggaggttgagggctgcagtgagctgagatcatgccactgtactccagcttgggtgacacagtgagaccttgtctcaaaaaaaaagaaaagaaaagaaaagaaaagaataaagaaaaaaaagaaatatattttattgaaattaactgtccattccagcaaacaagtcttacgtcagccatttcatgaatacttttacccctacctgtggcctctccgattggcccatatgtgattatccagaaagtatttccaacaccctagctgggcagtgccccagtttattcactgacaccagtgactgtccattctcagggcctcggacgtggttagacatctctgagaggaaccatatttagattcccattctcgccttgaccccactccccagcagcttgaattggactattccttcttgatgggagactttgcttcctgtcactagggtggatggaattctcccagacccgtgtcctgacagtgaagggcatgagctgattaaactgatgttttaatttgcccagagatgcagtaccagggaattcctgagtcatgatgaaatgcaaatgagattgatcccattcatctattagtagctgtgaattcccaggctttggaaccagttcagtgtccagccagctgttgatttgcaggggcagctgagctctgggtctgtcctgagcatggcttttttacagagacaggtttctcaacatgctgctttggcattcttagcgtggagggtgtaaatcaaatactgagcaagtttctcctcggggatcacctctgcagggcaaagagaagtgaggaagatgccagaaaatagaaacctatggaaaattccatttcttggcatacaattgcattctctcaagttattacctggagaatgttccttatatatgaaaatcaggaagaattttaggaactttgtaagttttgctgaaacacaataagaggcatccagctctccctgtcatgtctgttttgtcatatcatatttatatcatatttatttaaaagaagagtaataaacattagtaagagggaaatttgttataaatagatgtggacttccagtaatagtaaggaaaaagattaatggggaccctccaccacttcccatgacaaacacaggatgaaatataactatgtaaagaagctgagctcaaaacaaagaaagggaaatcctccgaggctagaaataaacaggcaaactgaaaccagagtggaaagcagacccgttaatgctaaggaagggcatcggggggacatcagaacagagtgtgggttctgacatctagggactgggcatgtcatgcccatggggaacaggaattagggcctcaggcccacataaatggaaagttggaactgagaataggatataaaaataatttttgacaatcaaggtctgagagagtttactaactctgagactcatattgaaagaactactaaaggatgtgctgtaagaaagaggaaactgagcccaggaaggagagggagttctagaagtaataataatgaagaaattgataaacaactaggtaaatctttgaatggatgtaggatgttttaaaaacagtaataataagacaacaatcaataacacagaagatgggagggtaataattacagtaaaaagcactttaaggtgctaatattgtttaggaattagaaaaaaatattgattaattttagattttctgtttttctttttttgagacagccagctccgtcacccaggctggagtgcagtggtgcaatctcgtgccttagcctcccgagtagctgggactacaagtgtgcaccaccacaatgcccgactaatttttgtatttttagtagagacagagtttcaccatgttggccaggctggtcttgaactcctgacctcaaatgatccaccagcctcggcctcccaaagtgccgggattacaggcatgagccaccgtgcccagcctaattttagattttctaagacaagtatgcatattcaaaatataaaggtaatctctgaagaggtggtaaaacaatccataacctccaagagaaaacttgatcaatccacagagggcctgggaacacaaaagagaagcctacaaaaagcatgataaatagaaaacacaaatttggatggtaaaataaaatgaaatgtcagatactcacttttctagccaccctcgcagctagagatggccatgtggacctagttctggccaatgagacatgagatttttcctccttgataaaaagagggacgttcaaggagctatctatgctattcaaagagaatctgttctgatgtctccccacttcatgatttgtgtgtaagaaagtggggaggatgggggctgactgctggaaggaacactaatagtgcctaccaagtgaaccttgataacaacactggataataaccataccaaaaagacacttataggccaatctcagttgagaacatagacatgaaaatactatataaaacattagcgaataaaatacctcagagaaaaatgtatcatgacctaatcagatttacccctgaaattgatgaaattaacatttaataaatctgtgtacttattcagagtaaagtcaggaacacattaaggatgcttgttattaccatgtctatccaacattatgtaaaggcctagccaatgcaataaaacaagagagaaataaagaggaaaggaagaaacaaaatgatcatttgcagataatatgattgtctgatagaaatttcagacatttctacagctgttaacatcaatatgagaattcagcaagattgttgggtacaatccatatagaaaaatccacagcattattatacagcaggaaaaataatagcgaaaatataatttaaaaaattttttgtttataatagaaaaagaaacaaagttacccagtaatcagtctataagatatacaaaatcattttggagaaaaacataaaacatttgtggaagacgttttaaaagccctagacaaatagtgaaacataccatattcatggacgggaaatgttacaaagttggcatcaaatctcaaatcaatctataaatttaataaaaatctaacttaaaatgccaacatgttgttttttaaaaaatagaactggtgctgggtgcagtggctcacctctataatcctagttctttgggaggtcgaggtgggcgatcatgaggtcaggagattgagaccatcctggctaatatggtggaaccccgtctctactaaaaatacaaaaaaattagccaggcatggtggcgggtgcctgtaatcccagctactctggaggctgaggcaggagaatcacttgaacccgctaggtggtggttgcagtgacccaagatcgcgccagtgcactccagcctgggcgactgagcgagactccatctcaaaaagaaaaaaaaaaaagaactggaggagatatttgtaaaattcatatgaacaatttggaaagttgaaggaggggcttgacctactagatatcattataaagctaattcagtaattacataagtaattaaggcagtggggtactagagcagagttaaactcatggaacaaagtagcccccagacagatccaagccattattagtgctttgtatttaatagagctggcataagaaattattgaggggaagatgaactcttcggtatatgatgttgagatgactgggcttctaattggaagaatgactagagccctccttcacactacacacacaaataaactccatggctgggcgtggtggctcatgcctgtaatcccaacaatttgagaggccaaggagggaggatcgattgagcctaggagttcaagaccagactgggcaacctgacgaaaccgcatctccacaaaaaatacaaaaattagccaggtgtggtggcacacagctgtggtcccagctgttcaggaggctgaagtgggaggattgtttgagccctagaggtggaggttgcaatgagccaagatcgtgccactgcactccagcctgggcaacagagcaagaccctgtctctaaataaataaataaatagatagataaattccagattgattaaaaacctaaatgtgaaaaaatcagaagaaaatatatgtaaatagctatattatttggagagtagactagaactaattaaataaaaaataaataaatggaatcattaatattacaacactaaaatgaagagcctttgcatagcaaaagacacacacataaaaagtaaaaaacaaaaacaaaaaaaacctttgcatagtgaaagacaccaaaattaaaagaaccatccctgcctggaggtaagtatttcaaaatgcacatatagaccaagaccaaggactagtatttaatttaaaaaaaaaagaaaaactcttatagatcctttttttttaatttgaaaaaaaagacaataatccaatcaaaagatgggcaaaggattgaacatgcaattcagaaaagaggaaatgagaatggctaatataaacatgaaaaaaattcccaccttattggaaaacacaaaataaaaaagcaatagcatcctcttttacacacatcagatagacaaaaattttaaaaatctgataatgccaggtgttcacaaagatatgtgaaaataactcacttccaatgctagtaagagatataaactgataccacctctttagagagcaatggacagcaactggaaaagttgaaaacatatatacattccacttaacaattatatttctaggtagagccctagaaaaattcttgcactgtacacaaggagacatttaccaggagattagtcctaatgctgtatgcaatagaaaagaaatggaagcgattcaagtatctgtgaatgggaatacattatggcacattcacgtaatggaaaattccacagcagttcaacttaatgaactagacatactttgataaatttcaaatgcacatcgtaacgtgcaatatatcagctgcaaaaaacaaaaacaagtcccggcacgatggctcacgcctgtaatcccagcactttgggaggccgaggcgggtggatcacgaggtcaggagatcgagaccatcctggctaacacggtgaaaccccgtctctactaaaaatattaaaaattggccgggcgtggtggcgggcacctggagtcccagctactcgggaggctgaggcaggagaatggcgtgaacccgggaggtggaggttgccgtgagccgagatcgcgccactgcactcgagcctgggtgacagaacgagacgccgtctcaaacaaacaaacaaacaaatgtatatatacacatatagtatgatgccatttatatctactattaagatatacaatatgcataatattactacatttatatatattgtttacagacaaccgcatatgtaataaaagcaccaaaacatggagaaaccaccctcaggttgtggttacctttgaggagggagaggaatgagttggcatgagaggaaactttacctgtatctactacattttattttattttattttattttattttattttattttatttattttttcgagatggagtcttgctctgtcacccaggctggagtgcagtggcatgatcttggctcattgcaatctctgccttccgggctcaagagatactcgtgcctcagcctcctgagtagctgggattacaggcacatgctcccacgcctggctaatttgtgtatgttttagtagagacggtgtttcaccatgttgggcaggctggtttctaactccttacctcaaatgatcctcccaccttggcctcccaaagtgctgggattacaggtgtgagccatcgcacctggcctattcctttttttaaaagaagaaagttcatcacaaatatggggaaatgttagtttgttaaatctgaatggtaatgttaaaattcagaagtgtacaccaacaatggtctattttactgtaatttaaaaataaaatcgaaaatataaattctgggtggcagatacatgcatgtctgttacctttctctcgattttttatatattttttatgtaagtgaaattctccacaattaaacataatattttaaaagtaaattaggtggagaaatgaaacctggttactgtcaaaactggatggattagtgactgattgaataacaaaaggtacagatgatggatagtggcaaccaagagagaaaattctatgtgtaacttaaaaataatgtgatttagtaatgtgactcagaagtctgaatttggtcctattggattttttaagccaacatctggctaaatatctagaagatatcctttccatacccttgagaaacccacagccaggaaggatgataactctaaaagactgagtgagggctggacgcaatggctcacacctgtaattcgagcactttgggaggctgaggcagatggatcacttgaggtcaggagttcgagaccagcctggccaacatggtgaaaccctgcctgctaaaaatgcaaaaattcgccaggagcggtgtcagacgcctgtaatcccagctactcgggaggctgagccgtgaaaatcacttgagcctgggaggcagatgttgcagagagccaagactgcaccactgcactccagcccgggtgacggagtcagactccatctcaaaaaataataataaaaataaaaataaataaaataaaagactgagtgaggatccagaaaaacttcagtagtttggaattacaggccattttctatcaagatgaaattaaataggggcaagtatatggtcttatctttggatcccaaaatacaaattatataagtatgggatgaaacactgataactttgcaatggcctgtttgaaagaaatacagtgggtttagttgacaattcaatatgaagcaattatacatacacacacacacacacacacacaataatttagtgtgtgtgtaatagattatacagctgcaaaaattattcttcaactgaatcaataaaagtaacgtaaaatatctaaaaccatgtacttgataatcttgcccaattttccactagtcagaacatacttggaatatttttatctgttcctaaatggcacactttaaaatggatatagacaaactatatctagaaactcaagtgatagaaagaatgactgaagaaaccaaggatatttaacccggaaaagctagacttgagtgtatcatggtgccattagatggagaagactcagaactgtgtatgccacaagacctcacttagcaggaccaatgggaccaagaccagtgggtaggaatgccaggagaaagacttcggctcaggttaaggaagaaatttccaagcacacaaaccatctcagaatgccttatagtggattttgctattgctggaggtgtttcagcaagagtgagaccctgttcatcagggtgtcctgaagcagattcaaatatctaataggcggttgaacatattgggtggctggttaagttggacagcctggaagatccttttcaaccctaactttctacactcaaactatctatcagtcattgattgtcctgattctcctccagcatacatatgtaaccaatgaggcacaagaaaagaagtatttttagttatgcttgcaccattctaaaccaggtccaccatttcataattttaaaaagttcttgggcgtatttggtagagtatggatgcatattttggaaccagggagattatgagttagcaagagagaaagaaaaaaattgacagaatatgaattaattagataaatccccatcatcataaaagaaaaccaaatccattgtttaatcatcacaacgtagagccacctcaaggtgactcaagtcctccatgcataagtcatgtgactgccttgtgggttgggctgcttcagagtcataattcattaaacgagtatttgctgaaatgtacgacgtacaacacattgtgcaggcattggagagaatcccttaagaaataagccatggtcatggttcttgcctcctgatcaaggtagggtccaaggcattttcataagtccacagggcagtgggtcctgattgttggaccggccgtaactaagatgttcccagtgcccatttaataatgtacacagacaattatcattgacctatggacctgaacgcatgagccggcatagtgagtggattctcttccttacatcaatctgtatgggaagtcaaaccacattcagaaactgccttattgattacctaaagtaattattagaggcactggaaatattcaaagcctgtgtaatcacagcctactctccagttaatgtggaaatgagaaagttgctcaaaggggagttagagtccacaataattattatcactaagcaaagatagtgtaaacatccatctatcgaccactggtgtgctttggctggtggttatgttgtctgtgggggatgagtggcagacaggccaaaaaggaggcgtgaggctttagcagttaaggtccacagttgccagcaagagaaactgagtctcttgagcagaaaggacatttcatggaaagatgttaggagccctcaggatcatctggaggcttaagagtgggcagaaatcaacagccccatgatgacagccatctttaagtagagccagatggcgtcattctgccctcatcaccccctacctctgctgcctgcagccatcagcaccgcagctgccctgagtagatctgaattgtcctgtttttctttccaccacttgttccaaaatcccaaacacaagtgtcccattgggttcccagaccaagccctgggctaccagtgaatgggagaaaggaactgctaaaccgttttccaaagtggctgcactgttttatattcccaccaggaatgcaatagggctccaatttctccacataatcactgacgcttgctattgttgtctttttgatgatagccatcctagtgggtgtgaagtggtatctcgctgtagttttcatttgcttttctctagtgactaatgttgaccgtctcttcatgtgttcattggccatttgtatatcttctttggagaaatgtctattcctttgccaattttttaattgggtccaatgtccgttgaaaatgccatttatccttttaatacatgcctctcatttcccagagattgtggggttgcttcatcttctggccccctcctacagcatctgacatactgttgatatatagtacattatgatggttgcctaatatatttggtatatgagtactaatgcattagtacatttacattagtactaatacaataatacattgggtaattaagagggaatctcgctctgtcacccaggcaggagtgcggtgctgtaatcttggctcactgcaacctccgcctcccaggttcaagcgattctcccgcctcagcctcctgagtagctgggattatagacacctgctaccacgccgggctaatttttgtgtttttagtagagacggggttttgccatgttggccaggctggtctcgaactcctgacctcaggtgatccgcccaccttggcctcccaaagtgctgggattacaggcatgagccaccacacccggcgtgtgcttgggcttttgatccagttcagttaaccaagtaagtagtatgccttgacacgtcttcaaaaatcctggttacaactggcatccaaggaatgggggcatgatactaatcaaattctagaatagtgattctaaataaaacctgtcacccagaaacatatgaaggtggacttttcttttgtcaccttttcttttcacttcgtcgctagcatctctcggatcccttcccactgaagcccaggaggggagggaatgggggtgggggtggaggggcactggagaaaagatggaggctatttttaggcttgtttttcaaccatgaagtgtcatgttcttcaccaccctggctgctggattaattaggctgtgctggcagctgccagtcagggagggttgccagcttctaacggtgattccgcctaatgcctgaattgattttcagggagagaacatttttcccgctacatggcccttgccttccacggcaatgtctcctggcctctgatggctttgggtaggagaggataaagctttcataagtcatgaactcttttttaactgatgggcttgcaaagctaccagctggtccttttacctaacagcttgttgatagaaccttgtggtcatggcttgggtctctctttcccatttctgcttcctgttctcccagatcttccccaaaataagctcagtgcccagaacttgtgtggctttgggatattccactgcccgggcaacaggcaatagagacagcatcagagacatagactctgaccaaatagctcattttcatgctatttttccaagaatctctatggtgattgttaacttctagatatacaaagacaatatttagtcattaaaaaaatacttattgaggccgggtgtggtggttcacgcctgtaatcccagcactttgggaggctgaggcaggaggatcccttgaggccaggagttcgagacaagcctgggcaacatagtgggactctgtctctacaaaaactttaagatataggcaggcgtggtagcacactcttgtagtcctagctactcaggaggctgaggcaggaggactgcttgagcccaagggttcagggttgcagtgagctatgatggcaccgctgcactccagcctgggtgacaaagtgagaccctgcttctaaaatatgggtctcccagcactttgggaggccaagcaggcagatcacttgaggtcaggcgtttgagaccagcctggccaacaaggtgaaaccctagctctactaaaaatacaaaaattaaccaggtgtggtggcatgcctgtagtcccagctactctggaggctgaggcatgagaattgcttgaacccaggaggtggaggttgcagcgagctgagattgcatcactgcattccagcctgggtgacagagcaagactctgtctcaaaataaataacataaaatatgggtctctctatccatttattcatttatttttatttttttaccaaaatatataagctgctgcccatgctatgtttgaaagatggctccttatctagtaatagctggtcaagttacttgactatgtgaatattagactgtatacatagtctatacatatatatatacacacacatacacagacggagagacagaaacacctgctgggcatcacacaccgttctaggtgctggggttgcaatagtgaacagagcaaacatccctgccctggtgggacttgcattccactcgggagtgacagtgcacaatagccataataaagaacagtatattggccaggtgcggtggctcacccctataatcccagcactttgggagcccgaggtgggtggatcaagaccatcctggctaacatgatgaaacgccatctctaggaaaaatacaaaaaattaaccgggagtggtgtcccgcgcctgtagtcccagctactcgggaggctgaggcaggagaatcacttgaacctgggaggtggaggtcatgccactgcactccagcctgggtgacaaagtgagactccatctcaaaaacaaaaacaaaaacaaaaacaaaaacaaaacagtatatcgtctagaatatatacttttatatagtctgtatacttatgtatattacatattatttatatagggagactatatatgtatatatatatatatatatatttagaaggtgataagtgttatggaaaataatagagcacatggggtgcttccttccaacctttcagtccatgctatcctattctgtccccatctgagtacttaaggacttgtgagggactctcatgctaccgggcccctcttccctgtgctcctgtaggaactcatagaaacagaatgtttaggcctggttgggatctcagaggttttccaggaggctttccacctgggttctgcctcactgctgatggatgatggtgtgtcctgtgtcgccttgccaggggcttctcagcacactgtccacataaccctgatgctgtccaagctgagccttccaggaacctgcaggaggcaggctccttttcccagaatcctgacacaaactgtcttgttaagcagggaggtcgggggtggggcccgtgagtccaagttcaaggaacttggtttctggccagtccctgccggggaggccccggcagccttgcctcccacagctgataactctggtcccgaaactgctcacttccctactgccatataaacaattacattaagagcacaagtaaaagaccagccagaacaatcacttagaagagtaactaaatgaatcagagcagctggagaagatattttaagaccccagaaatcactgcacatagaactggatgggggcaattgattatgaatcaaacagatgtcaattgccagttttagtacaagaaggaaacaaaaggtcagtatattcctcctggactatcttgtgagaaatgaggatatgaaggtagcagagttctatttaaaatgagctgcagtcatttcagcataatctcagtgcagaacatggcaggttttaggtacgctgttgagaagaaaattccaggactgtcttttctgctgggaatgttcaagttctggtaaaggccaggtgcactggctcatgcctgtaatcccagcatttcaggaggccgagatgggaggattgcttgagcccaggagtttgattccagtctgggcaacatagtgagaccccatctctaccagaaaatttaaaaattagctgggtgtggtggtgcatgcctttagtcgcaactaccagggaggccaaggcaggaggatcacttaagcccaggaagtcaaggctgcagtgagatacgatcatgccactgtactccagcctgggcaacagagcgagaccctgtctcaaaagagaaaaagaacaaaataaaatttctagttaagaccaccgtaattctgacccctgttgagaaaatgaaattagactctatttagacacgtttggcctaatgatgttcaaaacctcctggagccaaagcccaagtgagcatacattgcaatgtgagatcaggtaccagggggagttttgaattttgtgatcatagggatcgtaaagtaccagaagcttctaatggagggatgatttaggttctgctccagaagctctttatgaagtaggtaaacacccataacctgagaccagttcagattatgcctgcccctgaaccttcttattaaatcagttgtgatttcgggaaccttggggaatttatgacatgagagatgatctgccagggttcaaaaccttgttgctgctgatgctttgggctggatctttatttgctgtggtggtggggggcggctatcctgtgcatcataggaggctgagccgcaccctgggcctctctctgctcagtagatgccagtagcactgcccaccccacctcgcctctgttgagacaaccgaaaatgtccagacattgccaggtgtctcctgcaggaggcaaaatctccctctagtgagaactcctgttctagggtgaccaaccatcccagtttgcctggaactgagggattttctggcaggtgggactttcagtgttaaaaccagggaagtcccaggcaaaccagatgagttgtccacttggctgtgtcattgatatgttctattttataccaacgtttaaaagtaagaacccgggctggccatggtagctcatgcctgtaatcccaacactttgggaggccaaggcgggtggatcacttgaggtcaagagttcgagaccagcctggccaacatggtgaaactttgtctctactaaaaatacaaaaataagcctggcgtggtggcatgcacctgtaatcccagctacatggtaggctgaggctggagaatcgcttggacctgggagatggaggttgcagtgagccgagattgtgccactgccctccagcctgggcgacagagcaagcctctgtctcaaataaataaataaagtgagtaagaaaccaaagcttttgaaaagtctgtctttgggaggcattgacaaggcatctgggggaatatgatgctgcttgtggtatcattttgcccctctttttcctcaatgtctctaaagcctgagccctggtgagatgggccattggaggtttgatcctagcccatagaccaaggagactcgattcaaacttgctgcctttctaatagagaggctcttgtttgacacttagagtgagcatgagtgacagactttttcttggaattgtaggctgtgtgacagtatacatcatgaaagtgacagcaacagtggggactaatttaattccattttcctttgcaggccctgataaatcattgctgcagggaaaaataaattttactttctcagacaaatgattggaataatgatgtgctgtgaggaaatcgggggctgagagaagatctgttggtgggcttaaaagtatttaaatagcgcatcatggaacttgttgcaaatacctctcgcgtctggcctggaaaataccagaaggaacctcctttccagactgattagaagagttcaggccgggcgcggtggttcatgccagtaatcccagcactttaggaggccgaggcgggcggatcacctgaggtcaggagttcaagaccagcctggtcaacatggcgaaaccctgtctctatagcttgaacccaggagacggaggttgcagtgagccaagattgcgccactgcactctcgtgtggggatagagcgagacgtctcccaaaaaaggaagaagagttccataaaatatcagctatcttgactaaatgatcgtggttttttaggccatctcaatggaaaaggtcattgattatcgtgctgcatatcctatataagttggtggctgaaacagctaaaatagattctagaatctggggtcctgagggaccatttacaaatagaaaaagtctcgacttggatggaaaattgccaataattttcacctcccttccagaaaatgactgtggctcaggagtatagttctgctgggaggcttttaaattgctataggaaatgaattacggggcgaggaggtacttgggccccggactactactatgcatgaggattggagtgaatttgaggaggggtgcaatgtagatggaacccctgcccacaagaggacagtggagaaggggctttaataccgtagggagacatatgcgctttgtctaagctaaacaatgcctggcttacgtgagggagattctccaaccctgagtcagtccattaaaagcacaagaaaatcacctgcctgcaaccagaatccacatcttcccacactaccattggcatattgcgctagggtgtgggggcaaacaggaaggaaccaggggaagttttgctcatgaccatttcctgcacgcgagccagtgtaattttcccactgtcagcgtcacctgagttgcactccaacttcggtgatggatggaatacatcatcagcgaaagctataaaaaccccatccttttgagcagcgtgaacgtaagggaaatgagcagttactgcagagaggattttataggagtgaaaaattctgcatcagagcagcaagaaggattgttatgtgaatgatcaaactgcttctgctgactcctcagagcccgcctaagagcaggggccttcatctgacactcactccacttccggggaactttgctttcctatttgttttaaccctgattaacagcgcagagctatgggttaggtccggccagccactgagagtccatctttgtgttttcaaaagccaggcctggttactgtcagaaataagagaaacaactggaaaagacaggcaaggtacgcagtattttacgggctctgattgtcatttagatttcgcatccaagaggggtttgagacttggggttctgttagctccatgtcccttccagcctcctggttctatcagcttggaattcaaaaccgcttcttgatgtttcttatttccaacatgtagctaagttgctgagagtatacgtcgtcttcctggatccgatcgactgctaggcatgagtggcccagacacttagctataggccccagagtagaaaagtagcaaatggtagcctctggaaggacagaaacacttggttatcgggctggaataaaaatgaaatcatgggccgggcgcagtcgctcacacctgtaatcccagcacttttggaggccgaggcgggtggatcatgaggtcaggagatcgagaccatcctggctaatacggtgaaaccccgtctctactaaaaatacaaaaaattagccgggcgtggtggctggcgcctgtagtcccagctactcaggaggctgaggcaggagaatggcgtgaacctgggaggcggagcttgcagtgagccgagactgcaccagtgcactccagcctgggtgacagagcgagactccgtgtcaaaacaaaacaaaacaaaacaaacaaaaaagtgaaatcatgcagatgtatcttaaggaatagaaatattacatatttcaatataatatttaaggaattagctggggctgcactgttctctaagttttgcctctgaagaaaaacaaaacattgctttctggtttgcaaaagaccctgggacctgtgccttttgagaatttgttttctgcaaatgactgctccagaggaacagctgtgtcattttattggctttctaataactttccgaaacaaattgctgcaaattaggtggattaaaacaacacagatttatcctctagcagttctgggggccggaaacccaaaatcaaagtgttgttttcttctggggaaactgagagagaatctgtcccgggcctctgtcccagcttcttgtgttctttggcttgcagcaacatcatttccatgtctgcctctgtccttgcatggctgtcccctcggtgtgtctctgagtctcaaatctctttctcctttctcttataaggataccagtcattggagttagggcttaccctaaatccaggatgatttcatcttgtgatctttaaattaattacatctgcgaagagcctattttcaaatcaggtcatattcacagttactggagattaagatgtggatccatcttttggggcagacacaattcaacccactacaactgtattttgttgctcttcctatctctaagttgctgctctctgttggttttgtccattttcaaaatgtcacttgtatgagttgcttaggctgacatctatctctaagattagcttcctctccctgccagtgtttgggcttaaacattccgtgataccactcctaggaggcaaaggtcaggctggccaaccctccaaacatggaacccttcaggccctgaattctcatgtctttgcaaatccaaagaggacaggctgacagtctgatggagtcccccaccaggctgtagccttctgtctttacacattttgagagcacttgaatatgcacgggaaaaagttaactatgacaaagaccgaagagatggggaaagggcagctgtggagaaaagagatgccccagaatccccctgatttctccagcattttatccagaaagatgtggtagtgtggtgagactctgaacagactccaattgtcttttttctttctttcctcttagcaaactgcctagttgggctagagctgttgtccccaaaatattttatgtgacagagaaggcttggaactattatccctacacaattacaggtaagtccttagtacaaccatatggcacatgtagtgagtgcaaggacatagcatagttgaatttcactgatttacagtggattatccaagcagggccttgtgggagccccgtagtatccctctttttttttttggtttcttacttgtaggttatcaacacttctaacacagacacagagatggcaggtgacaggggggttaagctaagccattccatcttcgttcttagagttacaataaatagtttacggagggccaggcgcagtggctcactcctgtaatcccagcactttgggaggccgaggcaggtggattacgtgaggtcaggagttcgagaccagcctgcccaacatggtgaaaccccgtctctactaaaaatacaaaaccaggaggtggaggttgcagtgagccaagattgtgccactgcacgccagcctgggcaacacagcgagactccgtcaaaaaaaaaaaaaaaaaaagcttatggagaaggaaggtgaagatctttatagagacatttccagaggttttatgattcttatttccctgtttcctcaataattcccaagtaatttaggggtataatttgtctgtaaacaagttgcttattatgacttgtttgtttttaccactccaaattttgactatactttgtataaaagattctattggatctctctttgcccccagatgacttcctttgctattagataatatgaaaatatttaaggtcagtctccctctcacttgcaatgcgatgacaataaactctttgtactgaatactgtcctagaaactttggccaaaaaaactcagaaggtttggttcctgccctcaaacacaccaaaatttgaaatcccacctcaacgtcatcaataacaagctcttcttattggttacaaaagctgcttttccacttaaaagatttcctttgtggttaatgaaatactctactggaattattagtctttcatttgcttttataatgccaactctttggtttttaattagccacaagcctataggctaattgaatcttgtcttactgttcttatctgcccaaccacataagtatcatgaaagaatttcagtgcaacacggagacattcagtatttatgaaagtttcattaggacatcttttgtaattatagttcgtcagtatttgttagttctgtggtttttatattgcatataagcatgatctaaatcatcttttgtctcttttttctttcctctcttcttcaaatgaacatgtggaaacagaatacacagtaagttccatttaattatttttaaacattctgtctatgatcagtggagtaattggaatgtctcttgtattacttgtcttatcaatgtaataattaaaaaggggaataattccaagtcagaaatatttaaatgtaggctattgcatcgttatatataatgcaataatttgaatgttctcatttgttcaagaatgtgaatcctaattgaaatcgccttgatagtcactttacgtaatcagcctttgcttgtaatttttaaatagcttgactgctttgttggtgatagttcactataataaaagaacagtttctagcaacgtgatattaaagagatgatggtagttatcgatggaaggtggggcttttactcatggactgtgtcctgattccttgttggagaagcttgaaagtgaagaggcacatgtgcaaactattttgcacaacagagatctgggttgggcagtcgctgtggcttgataaaatttcttcttctcctaagagcctctagggttattacttagactgaaagaaaaaaagacagaacctataatatcattgtgttgtggtattttcatttagatcattttcccaagcagctaacaggtcaacctatcacaacaagaaaatagtttatgatttttttttttttttttttttgagatggagtctcgctccatcacccaggttggagtgcagtggcacaatcttggctcaacagaaactttcacctaccgggttcaagcaattctcctgcctcagcctcccaagtagctgggattacaggtgtgcaccaccacgcccggctaatttttttatttttggtagagatggggtttcaccatgttggccaggctggtctcgaactcctgaccttaggcgatccgcccaccttggcttcccaaagtgttgggattacaggtgtgagccaccacacctggctaatagttatgattttctgagctgtgttaagagttgagtttttgggttcaatccaaatagccaaaggatagagaggtggtgagagaaatggaagaaaatgatttgtcatgccctgggcaggagcatagtacccaacgcatcgtaggtgctcaatcaatagttattgaatgacagaatgaacacacaaattctagatagataaatggtcccagcacaggctttggcgtcagaaaggcttggctgtcctctggttttgccactcactgccagaattcctaagcgactggctcccaactgccagttcttgaattcacactggtcctcgactatgttctcaccagtcctctgcagaatgaagaaaaaacaggaatagtattcagagattttcataacattaaatttatttcatccaaagtactgttggtaattatatcccatcatactcggatattaaaatatcttttcttttttgaaatgataggaatatatatagtatttccccccgcaatgtccctaactttgaaaaaagaggcaattttatggcaaaatgcaaatgtaaaattttagaagcaggggaacctttgctctagaatgaacatcttaacttttctgaacctgtttcctcttttctgaaattagaataatccctccttcctagagatgttagcggaaggattcagtggtctacccttggattggaaaacattgtctttagagggtcatattgtaaatgttttctgttttgtgagtcatatagtctctgacactgcaagagcagccttagatagtatgtaaacaaattagcatggtcatatatgcccaggcagcgggtcaaatttgtcccccaggctactttgccaacgctaaatataaagctgttagcacactgcctgtatacagcaggtaattaaatgattccctaccaccaacactaccccctagttccattgcttctggcaactgcataatcatcaagaggtagactttgggccgggtgcagtggctcacacctgtaatcccagcactttgggaggccgaggcaggtggatcacttgaagtcaggagttccagaccagcctggccaacatggtgaaaccctgtctctactaaaaatacaaaaaaaaaaaaaaaaaaaaaggtagttgggtgtggtggcgggcgcctataatcccagctacttgggaggctgagacaggagaatcatttgaacccaggaggcagaggttgcagtgagctgagatcacaccactgcactccagcctgggcaacagagtgagagtccatctcaaaaataaaaaattaaaaaattaagtcaacggtcatttattaggcatcagtgaggtacaaaacatcatgctagatggcataactgagcaattatctctgtcatttggggtcacaatctggttggaaatagctggacattccagtcaaagcctggcagtcatcagcaagtgctgggcttttctggaggcaagaggggacttagccaaggaaacaagctggcctcagacctgtccactgggctggataagctctgaactgagctgccagcagagattcagacctcagcagagggcagaatcaatgactctggggaatccaaccagataaagcagttgcaatgtgaaaagaagggtgctggcctctgcattggggccttgagttttggggacagggctacagtccccaatgtgggagacaggaagaaaagtacacagcactcaaggaggttactcagtatcatggtgctggggagataaggttgtcaaccttagtaagtgaaaatacagaatgtccaggtaactttgaattttcagataaacagtaaataatatttagtataagagtgtcccacatgttgcatgggacataattatgccaaaagattgttgtctcatattttgtctggcaaatttatgggagagagatggtggtgtggaagaactggtctcagagactcaagtacaaaaatcagttatgagaacagggcacactgatgggccaagggaagggaggggtccagaagtatgtaatgtgggaacccatcctgcaattgacatgccataggaactctaaggtcagaccagagattcagccatctggtctgaatctctgctggcagctcagctcagagcttgtccagctcaatggacaggtctgagactaacagtcaaatgcactgatgggaccactccaagagccttcctgcctcagttaggattggctcaggaggtggaatggaaggagctaggcagagttcgggaaaattaagtggtagcagatgaatacataactgtcagcattttaaggaagaactgtgttgcatgtaagtgttagagctgaagtgcagacagaggattgtaggaaggagagagggattctgccagggagaaatatgaggaggtttctcagagaaggtcgcatttgggctggacctgaagggacagtacaactccccctgcagaggcctgttctgtgttagctcatgttgctctaatgaaacaccacagacttgggggcttgagcagcagacatttatttctcacagttgcagaagctgaaagtgcgactgggttcctggtgagggctgtcttcctggtaagcacgtggccatcttcttgctatgccctcacatggcagagacagagcaagttctctggtctcatctttgaagggcactaatcccatcatgagggccccaccctcgtgacctcatccctacctgattagtcccaaaatcccatctccaaacaccattgcactggggattacagcttcaacataggaatttgggggagacacagttcggcccatagtatgctccttccaggaccagtgggcaagtgatggaggtggatcctggccacctggacacatggatggagggcaggtcgtggtgttttcaatgtcaggtcaaggtctagatttaattctctgtgaggaggtcacattgttcctggctagttcacttttattttccatcccaaatataggacagcttttctttccatctccctggtgacaaggggatccggatttttctctctggctctagtgcagtcctccgggcccacagtgtgcggtttgaagctgccacctcttgactcagattcagccgtgttctcacgctctctgtccacgacagccctggtggcagaacccacccttgactctgactacagagtctgcacccaggatttatgacagatgctttcagttgccttagtcttttttcctgttttaaatgcttttgaattgtgctctttatcccctgatcctttaatcctaaatacctcttcttgctgtctttcccaagctccatagttcctgttcggtgcctcaaagcaaaacttccccaaggtcagagccccagttaggatcacggtgcccttcctttcctcagagaggcagcccggagggctcagaaacctccaaaccaatgtctcttcttggaaagcattagtccagagcacgaggatgtctatactaggatcccctaggtcttatatctgactgtttagcctattactcagacctcatgctgccctcattcgtgacaaagcccaggcaaagaaacctatttagagtcatctagggcttcagcactatcacaattatcaagacataagagctttttcatcactgtgagtgactgcgtgtgtttagaattatgtggaaatgccatttgcccaggaagtgggaaaaacatctttagcttgcttatgggaaaaaaaaaacacttaattatacagtaaacaacaacacaatgacagtttcacagaggacagaccattcaaccagttcttccaaactggtgggttcttctgaagttggtaaagtctgcaaagaaaggtgcctgaggagactggctgccttccaaaggagttgattttgtttttctagagctaaaaaaaaaaaaaagtctgcgctttcagatgagcataaatcagcagtatcaattcagccttggtactaatgaagaacaaaggattttcttcttgtttgtaggaatttgaaaacttaagttacaggaaatggatagcagggacctagagtaatacagttggcgtatatattttgcgaccgtgatcacccctctccaccggcatctctcttaataagaatccacaaaagaggagaaatgggatgcacctttgtgttagttagaatgacagaagcaaaggcagatgggttgtcaatgttacccaacattttaaattatttagatgagagaggtggaaaaataaaattgcaacagaccagggaggatgaaatgactctttcatgagaacctcaaatcgtattgagccactatgagagagagattactcagggctggtttagaagagccaagaaagagaggaaaggctgctcacagctgagagtctgtcatcagtcaccccaggtgaacccgggttatctgcccaggagtggccatggggagaatgaggtatgtttctgaaagccactaaactatctgggataggaattgccctcacagtctgggccttatcaagctcccccagtaatccaaagagctgataggtgctgtgtttagagaccagtgacccccattcctcccaagccccgtctcctttcttaagcctttcttccccgcaccttcccctgagtcccagccaaggggcagtacaaaccactgtatttcataactaggaacacaggaacaagtccagggaagattatgtttattataccagacctctaggattgggcttgttaggaaattaaagaaaaaaaatctggctatctcatctacgatgtaagctaagagggtgaaagtccctaagagtcccttctttgaggccatggagtcaggagttagcgggttaggaaataacttttatctatgtatcacaattaaccctcgatatttagtgcagtacataattttttttagacaaagggaaatatcctttttttagggaccaggccaaagaaacagtcctccagttgggggcactgatgagcaaggcagcaattaggcacgggcctgaaaagcacccttgtggagaagaggacagtaaggccaggtgtggtggctgatgccagtaatcccagcatttcaggaggctgagataggcggatcacttgaggtcaggagtttgagaccagcctggccaacatggtgaaaccttgtctcgactaaaaatacaaacattagctgtgcatggtgacgcatgcctgtaatcccagctcctcgggaggctgaccttgaacccaggaagtggaggttgcagtgagccgggatcatgccactgcactccagcctgggtgacagagcaagaccctgtctcaaaaacaaaaaataaacaaacaaaaaaacccaaaaacaaagaagattatgtgagaccggtgtcatcacagagccagaacgaccaagctcaaaaatcgtcacagttctagagaatttagatggaagcagtctagaaccatttataactaccattcaagatggtacacagcccattaagtaagggatgggctatacagagctaaacagattttataattataggacttctcagagcctttcttattctaatgtacattgtgaatctccaaagggagctgtggcatgcaacgtttcccgagctgatttgtccaagggatcttggattttgcaaggccaatcttttaagacttagaggtgttccagaaacttctctttaggtcagagccattatgtgcccactaactatgccagtggatcaattctatttcagtaaatgttatttttttctaaatttcagtgagctaatgtgttgcctgaagatgactattactcagataccaaagttttttgaagaatgcccaacagtaatggaagtgttttatttttagaatcaggtgacacagaacccgtaagttccttttcaagcaaagtcagttctgttcaaccacacagcaaagtcagcagtacgttgggatggcagtgggtttgtgcatttggatttgtttccatttagaaaatgaactggttgtatggacgagccagttgcaaaccagcctattcacagatgtaccgctgcccttgtgtgggaccagagctcgcctctacatctcagcaccccaattagtgcctggtgaagcaggagctttggaacagccagttttgtttgttcagattatcccgtttccacttgctctagctgttcccaagctcttctttggacttcagagaaaattaattcagccattttgaggggaaagagcaggtgatagaacacgtggctctactgtaacaaaacataacattttaaaattgtttgcatttttttaacaccactcgaaatgactttacagagggcaatcagcagagaatacagagttgtttaagggaatgtttggtagaagattttactaagaaattctccttttcttcttttttgtttattttccacttgcagtactgaaaaatttgatttcccttctgcagtttacaaatgtctgtggagttgtgttcagctcagttgttgagatctgcagaatacaactggaaagattttgtgagcagatttctttctgtaaaaataaaacagtatgactatgggtataccaacatagtatatttcagggattaaagtgaatgcaaaggccgggtgtggtggctcatgcctgtaatctcaacactctgggaggccgaggcaggtggatcacttgaggtcaggagttcaaggcaagcctggccaacatggcgaaaccccacctctactaaaaatacaaaaattagctgggcgtggtggtgtgtgcctgtaatcccagctactcaggaggctaaggcaggagaatcacttgaacctgggatgcggaggttgcaatgagccgatatctcaccattgcactccagcctgggtgacaatgtaagactctgtctcaaaaaaaaaaaaagggaatgcagaattgccctgaggtctttgatctttttgatcagtaagataatgtgaactacacgatagtgtgtatttctttactgtctagacaagtgttgatacatcttttcagttcagaattttaaacatcgattctactttcttaagtgagaatttgctaggttggtgaagggggatgattcttaaccctttttaactgagaaggcttgccgtctgaaagtttcttacctggccatatgctcacctgtatttgggaagtcacactgatccattcccatctctgttattattatttttaattataaattagaggcaggttttcgctatgttgcccaggctaattttgacctcctgggctcaagcaatcctcctgcctcagcctcccaaagtgctgggattacaggcgtgagccatcacgcctggccctatctctgttatttacatgcaattctttttatttgatgtggtctccctgtctctttaaattcttgtcttgccattatagtatgtagatatcagtattcatgagcatcctctgcttatttctgccttgacaagtccagccctagatcgtatgagcctgaatttcgtttccctgcatgattatcctagaagtgcaagtgagtagcaaaccatcccccattcagaaaacatgctttcattcatgtcttcggctctgtctcccttctggccttgctttcctagtgagttgctattactcagcatgtcagaggacgggaagaggatccatgagtgaatgaactaatgaatgaacagaagcctctgtgtagggtgcgggctggtgaggagcagcggagaggcccgcgtgcatttccatgctgtagctggaatacaagcagctgttttccggctgtgtttcggagctctgccttccacacagtcccttcctctcaccctcctccacatctctttcaggtcccaccattcctcttggccacatttttcttcctatgcagcatatatttaggaagtcactctgattcatcctcatctctattatttacatgcaattccttttcttcctttcctctttccttgaaaagtctactttttttttccccacttgagttcttcttctcacttttgtggaactatcttctttgcaatttttttctccaactaccctgtcaccataaccacccaccttatttgtatctaaagtcatacgtaaccctcacaaggcagaagggcgaagggagctcaaatatctccccttatttcctttgcatctttgcctgtatgataactaaggttctgagtagagggtgacggccagacatttacctttttgaaattgatgtgtgtattaaagatcttctgtgcacaaaacagaaatttatattttgccttccaagcgtggggtaaaatttctatcaaaatggggagataaaaattttttaatgaataaaggaagctgaaaggtattttaagatctaggttctaccaactgtctgtatacacatttatcatccactttcttctacttttcaagcaacacaggcttttctcatttattttccagtagctccagcctcagagtcctggaagataataagccctaaactctatgcctgccctcattagcactgtggaacattctggatgtgagtctcctgttggtgaacagaggaaacacttgcaaatctagttttattaatgatcccatcttaagttgcaattcccagtgtggctttggagcacagttaatatgacaatatagaatacagtaccagagaatcgatgtcatctacaggggaactccattagagagaaagtcaagtctgtatagagtttcgtgcttgtggatagcagggaacacgttctacatactgttggaacaagatggcaagagaagaatgcattgaattccagataaaagctaaaaggaaattgtcttttaaaagcctataaatacttcatcaaccccaagccagctcctcaactcttccatttaactttcttgatgttaggcccgttgtaaagtgctgctctcagacatggaagaatttgggctggtaaacaagaataaagcgttgagttactgggctgagggttcttctcaatgagtggttttcaaactgtcctcctttaggtccaggagattccatggacaggtctcagtggccattctgtccctaatattttatttaaagaaaaactctgatgccagttaaaatggtttgaaaactactgaactgtaatatctctcagctcctgccctactctaaagaccatgaataagtgtgatgtatgtgggacaggaaccacttgaagcagcagttcccaaatttaacagatttgcaactcctctgtctacttagtggtgcttatattagtcaaggttctccagagagacagaaccaatggtgggggagatgtggggagagagagaaatgggtggatggatagatagattagatagctagattagatatgtagattagatagatggatgaatagatagatgattgatagatattaatagataagagagatggatagatagattagctagattaagtagatagatagatgatagatattaatagatagattgattagataggtagattggatggatggatggattgatagatattaacagatagatggatagattagataggtagacagattagataaaaagatagattagataggtagattgggtggatggatggatggatggatggatggatggatggatggatgagaggggatttgctagggaaattggctcacatgattagggaagctgagaagtcccacaacagcccacctgcaagttggagaccctggggtgccagtagtgtggctgagtccaagtcagaaggcttagaaccaggggagccgcgagtgtaggtcctggagtccaaaggctgaggagcctggagtcgttatccaaggacaggaggggaggagtgtgtccccactccagcagatagatccatacatttgcctttcctctgtattggtcctctccagcccctcagcaggttggatggtgcccacccacattgaggatggatcttcctcacctagtgcataccaactcacatgacagtctctggaaacaccctcacagacacacctaaaataaggctttactaggcttctaggtattccttaatctagtcaagttgacgcctaaaattaaccatcatagtgttctttataacataatcctctttaagttaaagtagattaaattataagaatttttggaaaaccttgtgacttcctgtaagataatatagttactctgggatgccattgatgtattcactcatttttaaattggatttaaattttttctgcttactaaaatagtagatatttattgtaacatccaagcattataaaaatctataccacagaaaataaaagaacttcataatttccactactctcctccatgagaatattttcccatgtttttcggtgggtatactagtttttcaatgtttttcagtgtgtatactcgtttgccatgtttttcagtggatatactagtttttcaatgtttttcagtgtgtatactcgtttgccatgtttttcagtggatatactagtttttcaatgtttttcagtgtgtatacttgtttcccatgtttttcagtgtgtatactagtttttccatatttttcagtgtgtatactcatttgccatgttttccagtgtgtatactagttttccatgtttttcagtgtgtgtactagttttctgtgtttttcagtgtgtatactaattttccatggttttcggtgtgtatactcattttccatggtttttgatgtgtatattagttttccatgtttttcagtgtgtatactagtttttccatgttttttcagtgtgtatacttgttttccatgttttccagtgtgtatactagttttccatgtttttcagtgtgtgtactagtaattttccatggttttcggtgtgtatactcattttccatggtttttggtgtgtatattagttttccatgtttttcggtgtgtatgctagtttttccatgttttttggtgtgtatacttgttttccatgtttttcggtgtgtatgctagtttttccatgttttttcggtgtgtatacttgtttcccatgttttccagtgtgtatacttgttttccatgttttgcagagtgtgtactagttttccgtgtttttcagtgtgtatactagttttccatggttttcagtgtgtatactcattttccatgtttttcagtgtgtgtactagttttctgtgtttttcagtgtgtatactagttttccatggttttcagtgtgtatactcattttccatggtttttggtgtgtatattagttttccatgtttttcggtgtgtatgctagtttttccatgttttttcggtgtgtatacttgttttccatgtttttcagtgtgtatactcgttttccatgtttttcgatgtgtatactagtttttccatgtatttcagtgtggatactagtctactttctttttgtttttacaaaaatggggctatcctgttttacactttgtttttttaatggttttagagtcgatcccaatgtacttaaccagccttctactggtgaactttgacttgtttccaagtttttttataggaccaacaatacagttaatgaacatgtgtttttttgtaatattttttcacatctcagaattcatgctggagttctgggcagggttttttgtttgtttgttgttttttgatacaggggcttgctctgtcacccaggctggagtgcagtggcgcgatcttggctcactgcaacctctgcctcccaggttcaagcgattctcctgcctcagcttccctagtagctgggatgacaggcgtgcaccaccatgcccagctaatttttgtatttttagtagagacagggttttgccatgttggccaggctggtcacaaactcctggcctcaagtgatccacccgtgtcagcctcccaaagtgctgggattacaggcatgagccacccacagggcctggacctgtttttaaaagcactttcataataagaattaacctaagccattatatttcaattcagtttttgaaaattattgtgttttcaaggtactagggtaatttggcatctaaaggaataccaatgaatttctgaaatgaataattatttccctaatatatcttttgagtaactcctgcttttcctgatttgggtttgtttgaagcaaggcacgtctatcatatgacagattcacacacacatattttctctgctgttagtggccacagcacatactgagaagcaaagcctgtgctttcaacctctgcttccctggaagcacttccatgatttcctgatacttaagaatcagcatgagatcacaagcatgcatgtcagagctagacagcctggcttgaatcccatctcctctatgcatttgttgtgtgacttacagcacactgttggacctttccgtgcctttgtttcttcatctgtaaaatggggatgtatgagggttaatgagttaatagatgaactaatatatatcaaatactcggaccagtgcctgttgacaggaaggacggtataacactattgtcattataacctctgtattgggttgtgtctgtccctcactggacatgtggaatgttggccaggtctcctttggattgtcattttgacccagaacctcccagagttaagaaatacctggacaggccaggcgcggtggctcacgcctgtaatcccagcactttgggaggccaaggcaggcggatcatgaggtcaggagatcgagaccatcctggctaacatggtaaaccccgtttctactaaaaatacaaaaaattagccaggcgtggtggcaggtgcctatagtcccagctagtcaggaggctgaagcaggagaatggcatgaacctgggaggcagagcgtgcagtgagccaaaattgcgccactgcaatccagcctgggcgacagagtgagactccatctccaaaaaaaaaagaaatacctgggcgacgagacgtgctatcaaggaggtggggaagttggaactctcctacactgttcatgggaatgtacaagggtgcagccactttggaatggggtagccgtctggaagttcctcagaaggttaaacatagagttacagtgtgatcagcaattccactctaggtatacactcaagagaaatgaaaacatggccgggcgcagtggctcacacctgtaatcccagcactttgggaggccgaggtgggtggatcacgaggtcaggagtttgagaccagcctggccaacatggtgaaaccccatctctaccaaaaatacaaaaattagctaggtatggtggcaggtgcctgtaatcccagctagtctggaggctgaggcaggagaatcgcttgaacccagggggtggaattgcaatgagccaagatcacaccactgcactccagcctgggcaacagagtgagactccatttcaaaaagaaagaaagaaaggagaagagaagagaaaagaagaaagaagaaagaaagatagaaatccacacaaaaactcgcacaagaatagctgtggcagtattgttcatagtagccaaaaaatagaaacaaatgttcatcaactgataaatggagaaatcagatgtagtatgtccgtacaatggactatcattcggccagaaaaaggaatggagtacccatacatgctagaacatggatgagccttgaaaacatgctaagggaaagaagccaggaacaaaagaccacatatgatacacttccatttgtaggaaatgtatagaatagacaaatcttagagtagattaggagttgcgtacattgtggtgctgcaggtaggcgggaatggggacgtgactgctgatggatacagggcttctttgggaggtaatggaaatgttctaaaattagattgtcctaatggttgtataactctgaatatactgaacaccattaacttgtatacttgaaatgggtgaattatatggtatgtgaataaagctattttttatttattttattttatttttttagagatgggatcttgcttgctctgtcacccaggctggaatgcagtagtgtgatcatagctcactgcagcctcaaactcctgggctcaagtgatcctcctgcctctgcctgctgaatagtaaagctatattttggggggaaaagggggaaacagctcctgagtttgggggtgggctcccagaatataccagcttactgaaagcgaggcatcgggagagaggcctggaatctgtttttaacaagcccagcaaatgaggcatcattaagtaggtcttagaaatacactgtcatagagaatacttttatttttcttttacattgtaaagtgggatagggtaggattaatacattttagcttacgtttttgccacaggctaggtgctgtggaaatacagtatcctttgatgacaataatgacagtcttcaaagtgagcggtgtacattcttccagaagtttcgcacttcctgcttctgaagtgcagtgccctagagagcctcagacccatccccagggcccccattcactgcagccactatcgtctctctccctatgcaggtgctgagacagaaataagggctgccagcaccacccagaaactgactatgaaatccccaatgtgtctgaccctttctctttaagactttggtttgcttacatttcattttgttcctgtaagtgtttcttattgccatagcaaccctaatcgatcactggaccaaaaatagctctttcatgttttccaaagcatgtctgtagtgaattggaaattcagttctgccgtgcattttgcatatgctgctttcatttcccgacactgaacctgggagggcttgtgtctggaaattattcttgcagagacccagaaacctcacttgtctttcctggcgttcttcttccccactgcagatccacccgtcacttccaaaagctacaagtagctgcatttaaatgttccaccatcacttttctgcacattgagttttgggtgctggaggttttacaggtaccagaatatcacttttcaataagaggttcatcctggtggattccgttgggtttggaaggccaattatagatgcttagacaccagataaaaggaagagggtcatggcagggagcagatggcagcaacacctataagattcctctggcttacgtggatctaagctagaaaatcaaagatgagatgacaggagagctcctgccttgactccctgacttcttcctaacactgctactgtttttagggggttggggcaaaataaacactggatgtaattaagtgaatattttctatgatgctttctctgctttattctccctgccaagctgtgcctttagtcaagaagagggagagagagataaaaaagaaaagatttttcatgagaaagaggattcgagacctggagtgagcccagaggaggaagaagaggtggagagggacagaaatgactcactgatttcccccaggctccagggacaggcgtgcttttttgcctccccctctgcctgtaagcagagtcatctctgtggcctcaagggttcccaacttctgttttatgcttctgtttcttaacttctttgagccttggttttggcgattgggttgagtgaaccagcggacgtgcaccctttagatctaggaaagaaaagagttcacggagatcctggtagagtttttgttccctgcatgaagtcagcagggggccaagggaaagctcagagaagaggccagtggaaggggcacctgcccagaagaaggagctgccaaggatggagcctgggacacgtggtgacatttcctcagcagcagagcaggtcagggattcagagtgagtctggaagagcccagatctgctctgtggtttggctgccttccttgccatgggaagaagccatcaggtgtcctgtggatgcctttccggaagcctctgcatccttgcatcttcatagtggaggatctgcctttgaccccagctcagctttctcgtccacattgcctaggagggtacaatggagtggaccaacatctctccagcatctgccaggcgctgcctggccctggacattcgttatctcttttcattctcaccccacagctttgaggttgcaattgtctccatttgatagatgaggaaactgaagctcagagggaatcgtgaatttgccccaagtcacacagtttgttggaaaagaagctgcggtttgaactgaagtctgttttactccaaaaatctgtattttttttttttttcctactaaatcatcatcctccctctctgtgggttaggtgcctgctgctgcatctggacaccagataatgacaagcttgctgacatcagttactagtaaatatcaccctgggcaataagcagtggccattgattgacaaagcaggtggcatcataggtggaactaataagtcagaaaaagcaccaattcccccttcccttgcacttgcttgaacctcagagtcggtgatgctttactcagatgaaaaccagatgggtgatttggaagaaggcagccagcaggctgagtgttgtgttggttttctcttgctgtgtagcaaatctcccacaaatttagcaacttaaaacaacacaagtggctgggtgcaatggctcatgcctataataccagcactttaggaggctgaggttggaggatcgcttgagctcaggagtttgagaccaacctgggcaacacagtgagagctcatctctactaaaagtaaaaaaaattagctgggtgtggtggtgcatgcctgtgatcccagctgttcaggaggctgaggcgggaggattgcttaagcccaggaggtcaaggctgcggcgagctgagctatactgcattcaagcctgggcaacagaatgaggctctgtctcaaaaaagaaaagaaaagagaagagaagaaaaataacacaagtttgttatcttgcagtttccatgggtcaggagttggaacccaggctagctgggtccttggctcaggcaactcaccaggtagaaatcaaggcatcaaccaaggttctagtttcaccagaaatgcagggtcctcttccacgctcactggtggttggcaggattcattccttgtggttgaaggacgaaggtcgcgttttctagctggttcttctccggctgtcactctcagttcccagtagacctctcttgggtcctatccacgtggctatctcacaacttcaaagccaacaaaagaatctctgctttttctaaagtgaagtcttgtatacactctcaggagtgactgactgtcttgtctttttgctatcaatcaaaagctgtgctccctctgaaggttctggggggcaaccaggggagtgacagcccatcatatccccaggttctgctcacacccgaagggaaggattacacaggatgtgtgcaccagtggctgggactctggaggccatctcagaattctgtctgccgtgggtttttcagtctttccttcatatgctgtgggccaaatgggactttagacattcagcatttccaaatgactgttccttagagagcacgggatgcttcagcagcccttagacatctttttctgttttagccaatggctgacgaccctagtgtctctcttcttggagcaagttcaggtgtggttacatcagggttcccaacgttttttccacccccacactcctgacagatccctcggtgatatagaatccctccacccaaggacatttatcaggatctttagggaacagcgcatattttgagaaaaagtccagggttggaaagtggggttcccgtctccccattgacattgagaatgactaggttagatggtatattcctagtggaagcaaaagtcttagttacagaaagcattatttgagcaaacctaaactaaaggagatgctttaacacctgaagaagctgggtaaagcggggggggggggtaaagaagaaggggggtgactttgatgaccaccattcctagtggtgctggtattaggggggcaccctcctgttagagtgtgagcttaccacatggttggtgagcctgggacacagatagctaatggtaatggtgacaaaggagatacgcgctgtgataaagggacaaacagaatgctgccagcatgcatgggataatcattccgaagtggtacttgagatggtctttgagtaagatttaggaaagaaatttcgggctgagagtaccatggccaaaaaaaaaaaaaaagacctgacagcaggaagttttccagggaagggggagtggacctacctagatttagggtgggtccaaatccaatgacttttgtccttgtaagaagagaagagagcacagagacccagagggaagaaggggatgtaaagacggaggcagagactggagtgatgcacccactcccggtgccaccaacagctggaagagacaaggacagattctctcccagagtcttcagaggtagtatggctctgccaacaccttggtttcaggcttctggcctccagaactgtgagagaataaattgctgctgttttaagccacgcagtttgtggaattggctacgataattctagagtaccagtacagtcagggagaacattcgcgttcattctggacctttcaagtttgatgaacctgtagggtctttgttggggatggccagtgggcacctggaaatgtgagaggagttggaatttgcgatgttgatttgggaggcatctgccaaaaaagaaaaaaatcatgaaaagtcagaagcagatgagatcaccaggggagagggtttggatcaagaaaagaggctgtaggtagggtaggacctgagggatctcctgtagggaaggagtggaggagggaggaaagggtgaactgctgctcaggatggaggagttgctcagtcatattgcagtgtagagaggtctccagggtgcaaatggaagagtgatgctgctttggaaatcctttgatgatcaggtgggaggtggaaaaagtagagacaggaagcactgaaactgaatactcttttttttttttttttttttttttgagatggaggcttgctctgtcgcccaggctggagtgcagtggcgcaacctcagctcactacaacccccgcctcccgggttcaagcgattcttcccgctcagcctcccgagtagctgggattacaggcatctgccatcatgcccagttaattcttgtatttttgtagagatgggggtctcaccattggccagcctggtcttgaactcctgacctcaggtgatccacacacctcggcctcccaaagtgctgggattacaggcatgagccaccatgcccggctactgactactcttttaataagtttttttatgaagacagaaagagatacggaattgattatagatgggggaagaaataggatcaagggaactttgtgcttatttattttttaagactgtgtctcttttcattatatttttaggctgtgggaaggaagcagggaaaagatgcaaataatcaatgaaacaaggttccagagaagagcttacaaataatttgtactgtgcacctactatgtgccagtcactgtgctggggtttagctgtgtgatctcattgatcttctgaacactcctacagagcggaaaaggattgtccccattctccacctggggcaactggggctgagaacagtaaaataacttgcccaggttgatacatcttggatttgagcccaagtcagctggctctgatgtctcagtgcttttcattatattatttctccactgaaaaagaggaggatatatctttctcggattcacaaagaataagaaacgtaaagaaataagcagatttgtaatggaggaaagggatgtgtcagtgtttctatcatgcagttcatgtcctcattaaactatgactcaaagtgatcagctgcaagggagaggggagaaagggtgaagccaggcaagggaccttgagagggtaagggatgtaggatagatcagtggatgagatataacagggagccaatcaggaagaaataaaagaccttgctttaaagctaagcttccgctaggattagtgggctggatttttggagaaaccagcctgcatgggggaggcagaaggttatcttaacatggacatcacccctgagagatttcagtgacggcactgaagaagcccagagccacagataattctgattttaactcaagacacccgcacaccccaggactctgagaacgagtcatcagacatcccaaggggattatcagccccaaccacctgccgaaggagaaagtactgacccgcttggagttaccaggagctgttctctggccaccctgctgaagccaggtgcactactcctagcctcgtggcaaggttgccattctgatatgaaaataaccaaagtccccactcaaaaataacaacatctgctaatttgcatgggagttttgcatttcataattgggtttaatacgcaaatgctaaaattcatgtgttgggctagctaagtggtttagaggttcagtgggtaaaaactcctcacagtgttccactctggtgcaccgagacccacacccacgctccacaactctgtactctccccactccttggtttgactctcatatgaattatgggataaaaaatacaaaatcgatttacctaaaggcttgtcgtgtctaagagggtctcagccagggcatccccccacgttctcatgtctgctttggggctctgagtcctccagcgtcttcatttgagatgagcagctgctccttggtgctacctgaacccggatataagggcagcggttatggagtgagaagtttgagaggagacagcagagagggtgttaatgaataatcgcagggccttgttctccataaaggcaattactgggattgattgtttccgtgtttccttagtcacggttcagatcccttgtttcactcagattaagacagatgcgtgctgaacgcgtcctggcatgtgatgtcaggagaattatcgatggcacgtcccaggcctctgtcttctcgtgcaggtgccaccaggggtctcagctgggctgaaaggggagcgtggtcattgtgcggctgaagcatgtgtgtgctatagccaggtggttttccaggttgagcatgcctcagcatacactggagggcttggtaaacagattgctgaaccccacctccagagtttctgatttagttggtctgctgaagaatttgcctttctttctttctttcttttctttctttccttctttctttctttctttctttctttccttccttccttccttccttctttctttctttctttccttccttctttctttctttcctttttttttttttttgagactgagtctcactctgttgcccagactggagtgcaatggcatgatctcagctcactgcaacctccacgtcccaggttcaagcgattctcgtgcctcagcctcccaagtagctggaattacaggggtacaccactacacctggctaattcttgtatttttagtaaagacggggtttcgccatggtggccaggctggtctcaaacccctgacctcaggtgatatgcctgccttggtctcccaaagtgctgggattacaggcatgagccaccgtgcctggccaagtatttgcatttctaacaattctgggctgctggagctggtccagaaactcctctttgagaaccactcagtatggtgaagagtatggacactgagacctggccacctggctgcatgagactgtaggccatttacttaccctctctgcacctccatctcctcatctttaaagcagggggggatggtaatagtacctccttcacgggattgttgccaggaataaatgagtgagagcatcagagcatttgtagcagtgtctggtatagacagtatgtgagtactggaatcatgtataagggatccagcctcttgggactgtgatgctatcaggccaagtctggtttccccaacacccacagatcccaatgcaggtgctgggtcattttgcccattagccgtcaatcccatctctggtggccaagaaagttaatgcccagcttagggctagctagagcgtggttacaccaacatccatcaaaattctcttcttaagccaccttaacccttcacatctactgaatgcataggacttgactcagcgagactggggctgtagggctgggttgcatttggggtttctgtccctcgtgtggacaaagacaaagacaggggctgccttttctggttcagtttctacccatggatgctgtctgctgaatgcattcttgctgcccagtattatacatttttaaaacatcattttattaatatttaaccctcacagtgttgctcttaggtaataattattactcctgttttaactctgttggggttcagagaagttaaatgacttatccaaattacatattaaaagccaggtctcgcccggatgcagtggctcatggctgtaatcccagcactttgggaggccgaggcgggagaatcgcataaggccgggaatttgagaccagcctgggcaacagagagagacccttgcctttaccaaaaaaattttaaaaatccgccaggcatggtgtcacacacctatagctgtagtcccagctacctgggaggctgaggtgggaggatcgcttgagcccataggtcaaggttacagtgagctgtgactgcaccactgcaccccagcctgggtgacaaagtaagactctgtctcaaaaataaaaataaaaagaaggccgggcgcctgtaatctgtaatcccagcactatgggaggccaaggtgggcagatcttttgagctcaggagttcgagaccagcctggctaacatggagaaaccctatctctactaaaaatacaaaaattagccgggctacacggaaggctaaggcatgagaatcacttgaacctgggaggtggaggttgcagtgagccgagaccacaccactgcactccagcctgggcgacagagcaagaccctgtctcaaaacaataaaaaataataaaatttaaaaattaaaaataaaatttaaaatttaaaataaatttaaaaattttttttattttactttaaaaataaatttatgttttaaaaattaaaaataaatttatgttttaaaaattaaaaataaaagccaggtctgtctgacttcaataatctatgactttaaagttctactatatccccttgctaatgttatatgagcatttatataaagattaaggctgggtccccaggaatccagcaatggtagctgctccccaaaagtaagctcaccagaactggaactggcgtgatttaggggtttgcttttctaaagcttatgctaggagtcacagaacatattccttttggaaatgttctcttcagggacttgccctctactgctggttattctctgtggcctgacctctgtctggatgaaactgtgttcattgtcctaaaggcggctttcctttgtctgaatttggatattgacttagtatcttaacatttctgttccgggacggtgcttgcaaccaaatggccaggaaagtattcagaagctctgctgaatataggaagagagaaaaaatgttatgctaatgaaaatttgcttttctcccacagtgttcctttctgccgaaattctccattcatatagaaaccaagtatgaggacaacaaaggaagcaatgacaccgtgagtagcccctccttccatgctgcgctcgcctcgtgggctctgaatatcacagcacttctcacagcccctctgtgaccagggccagcagtgggacctgtgcctgggacctcagagatgttctggcctttggcttctgagggttatttccctgggacttttccctggaattcttttgttgtctagcttttctttcttctcatttttatgtactttccctgggcctctgagcagaagcctctgacctggggtgattgtcatggaggtggagaggatgacagggcacttggaactccaagatttggtttttgatcattggacagagtacacatcttctcaatgcctattaatatctacttcggaaagggaatacaatcaaagatatgtgtacacagaaaaggaaatacagtcagatgtatgtgtgaacagaaaaggaaatacaggcctggtgcagtggctcacgcctgtaatcccagcactctgggaggctgaggcaggcacatcacctgagatcaggagttcaagaccagcctggccaacatggcgaaaccctgtctcgactaaaaatacaaaaattagctgggcgtggtggtgcacaccagtaatcccagctacttgggaggctgaggtaggaggattgcttgaacctgggaggcagaggttacagtgagccgaggttgcaccactgcacttcagcctgggccacagagcgagactccatctcaaaaaaataaaaaaagagaaaaggaaatagaatcagatatgtgtgtgcatactgcatgcatgcttacttacacacatgcggtgtatgtatacacccacacatcctaccttaaaatcagggggtacccccacaaaatatttacctcctgaggcattctgacttttactaaatttcagccaagtattttgcttattagtgttgggtaaaacccatcttctgacctggcttttacccccaggctctttctgtttgggcagtaaatttctaacttctcttttctttgggggtgactgttttgacctaccaaaagcctcacctgggattaggctgtgggttccctcaggacccgttgaaaggaagaacctggatctagaagcttcggggcttccccagagttcatggaacttcccagaggagagaaaaatacagctggcagcagtactatcctaccactctgttcaggaaccccatcgttagtgtctccttgaagtggcagcccaatgggaaatgtttagggccattttcctgtcacagcctgaaatcacaggcgcgttgctggccaaattcatcaaaaccaccatgcctaaaacagtgtcacactgtgtttcaacttgaatccttgtaaaatagtgattttttttttttttttttttttttttttctgattagaaagcagcctgggcgcggtagctcacgcctgtaatcctagcatgttgggaggccaaggtgggcagattgtctgagctcaggggttcaagaccagcctgggtaacatggcaaaaccccatctctactaaaaatacaaaaaattagccgggcgtggtggcgcatgcctgtaatcccagctactcaggaggctgaggcaggagaattacttgagcctgggaggcagaggttgcagtgagcgcagatcgcgccactgcactccagcctggcaacagagcgagactctgtctcaaaaaaaaaaaaagttaatacatggctattcaaacttggagaatgcaaaaagaaagtattgaaaaaagaaaggaaaaaccaatagcaatcccacaatttagagatgacttctgttagcaatttggttcatgttgcagattatggacaaatttattttttaaccaattcctcctgaattgaatcatatagtatgttatttttaacatgccctgaagtatgcttccctataatgatttttcctggctgtaccaccttccatatttcagtgtacttctttaaacaattgctggtcactggatattgaagtaagcttgactcttttcacgtagctgtggactctcatgaaaaggataataaagttcagttgcttgaattgcttttcctggcataatatgaaaatatgggggaattttttttttctttataagacagggtctcgctctgtcacccaggctggagtgcagtagcacgatctcaggtcactgcagcctccacctcctgggctcaagcaatcctcccacctcagcccccctactgggactacggcacacacaaccgtgcccagctaatttttgtgttttttttagagacgtggttgtaccatgttgcctaggctggtctcaaactcctggactcaagcaatctgcctgtcttggcctcccaaagtgctgggattacaagcgtgagccaccatgcctggctggaaaaaaattttttaaatatcttttagtctttccaaacaaatttccttgctttctctctttttctctatgcctctatctccatgagtttattcaaaacagctctccatttgaagaggtgtagagaggccaggtgctatggctcacacctataatcccagcactctggtaggctgtggtggacggatcacctgatgtcaggagtttgagaccagcctaggcagcatggtgaaaccccatctctgcaaaattaaaaaattagccaggcgtggtggcacacacacctgtggttgcagctacctgggaggctgcagtgggagaatcgcttgagcccaagaggtcaagcctgcagtgaaccatgtttgcacctctacactccagcttgggtgacagagtgccacctaaaaataaaaaagaggtgcagaggggacacgtggcctcactgtgatccctatagattggtgggaccactgtaatctggtttatcctctgcccagttcaaatcatccccaaaattcatatggttattgtgtattattatacatccttttttggcaggtgctcaggttttttgactactctcctaggaatttaaaataacaggttatccaccttacaatcaggatccaggcccatgccaagggccaggcccctttgagacttaggctgggctgcaagagaagcacctatcacctattcactctgtgcagtccttggacacagtttgcttcctctaggagaaatctcagctgttgtagcctggcttgcctccctctccccagaatgtggactctggaactgcccaggggacctgctgcttgtctgcctgtcatggcacccaacttgcccaagccccagtcctgccatcttgttacactaaagaggccctaaatgtgtttttggcccagttgccaccccctgccccccaggctctgcttgaccctgctccacggaccccaggtcttgctcctgaggccattggaccacacggcccagccccacttcattagacttctttgccaatttgccctcctctgttttacatattcagcggctgttggttgtccagcagattcaaagttggtcccagaaaggcagaaaaggagcgttgcgccgaggcacggtggctcacgcctgtaatcccagcactttgggaggctgaggtgggtggatacctgaggtcaggagtttgagaccagcctggccaacatggcgaaacctcgtctctactaaaaatagaaaaattagctgggcatggtggcgtgcacctgtaatcccagctactcaggaggctgaggttggagaattgcttgaacccgggaggcagaggttgccgtgagcagagattgcgccactgcactccagcctgggtgacaagagtgaaactctgtctcaaaaaaaaagaaaagaaaagaaaaggagggctgcatccgtttccattcatacttgttaatacttcaaaatctgaacataagaagtatatatttatctaacaattctttaattactaaacgctagctttatctagccagggattcaaaactggtgttttaagccaaggagtgtgctggtgtgctctttttctgtcctgggttgagtgtggagtttttggtgggaggcagagttgctaaggaaagcagtgcagtagtggataattctcttgtctcaccgcgtttccaaactatttaataaactcagttcatttctttgcactttctgggtgtacactcttatcattcagctaccatccttcatactgctatctgcactgtttcctcccctacctgccaaaaatttaatgaaattgatgacgataagaagcaataattaaattgaaagaggctgctgatagtcatattgatgatagtggttgaatcgagtacatgttgttatcctattatcaattaccatataagtaattttttgacgtgacccaatatctagtaaaaaaaaaaaaaatagtggcagtatgagtaaatatcttccttgttaaaaataaaaccagtatacgtatgattgtgaaaacctgcaaactgtgattacattaaccaggatgcaatggggaagttgtcttaaactgaggcccatttattttatgcacatacttatgagaattacttgggccttcattcgtgctagggaggacggcaccgtgccaaggtaaggttccgttgtttatccaaggccataaatctaggcctgtgagagtccgtgcttagcactgcctggttcagctgaatgagaggctgcccatgtggtgacggctgccaggttactggtgttcaatggggttaatgggggcagccttgctactttacttcctcttccaaacaaagcaggcaccatttaaagcagtggttcccagccttggctgcacattggattcacctgagaagttttaacaactcatgcctgggtcccagcccctgggattttatttaatgggtcctgggcgcaggctggtctaaaccagccaataagcatgaaggacagaacactcacttccagaacaccaaattctccagctggcagtgtgtgcagttttagagtctaccctgaggctgaacctgatatgttccctcaggagacattggctatgctgtccccacccctgagagggtctagaccagcagttctcaatcacagctgcctattaaaatcacctgggccaggcggggtggctcacacctgtaatcccagcactttgggaggccgaggcgggaggatggcttgagctcaggagtttgagaccagcctgtccaacatggtgaaacctcgtctctactaaaaatacaaaaattagctgggtgtggtggtgcatgcctgtaatcccagctactagggaggctgaggcaggagaattgtttgaatctgggaggcggaggttgcagggagccgagatcacaccactgcactccagcatgggcaacagagcgagactccttctcaaaaaaaaaaaaaaaaatcacctgggaagatttagccatcactgatgctgctgtcccagccctggggattctgatttcattggtctgaggtggggttgaggcattgggattctttttttttttttgagatggagtctcactctgtcacccaggctggagtgcagtggcgcgatctcagctcactgcaagctccggccttccaggttcacgctattctcctgcctcagcctccagagtagctgggagtacaggcgcccgccaccacgcctggctaattttgtgtgtgtgtgtgtgtgtgtgtgtgtgtgtttgtgtgtgtgtgtgtttgtgtttagtagagatggagtgtcactgtgttagccaggatggtctcgatctcccgacctcatgatccgcccgcctcggcttcccaaattgctgggattacaggtgtgagccaccatgcccggccggcattgggatttttacagttcccccaggtgaatctaaggggcaacaagactgagaactatagatttaaagaaatagtaagtgctatttaaaaccaacacttaggaaaacaaatgttttcactcctttatactcctggaaaataggacagtttacaaaaggcatatgtaaaccccactccattccactcccactcacacaataaaaagacctgggtaacatatgtgttctcattagccacatatcaccaaggacattatttcttggcaaagaaactcctctgataaaatgaagagaatgtccagtttagttcctggaaacatgaagctctgtctttcacaggggtctccttggaagctgcctaaaagaagtgtctggaatgtatttcatttctagctcctctgtgtggtaatgaaagaacacaaagttgttctttgtgaaacagaaagatcagtattgaagttccagttatcaccataagcctaaggcttggtttctttatttaaaaaaaaaataggataaataatgcttccatcagggtgtagaggatgcatagaggttcatttacatggaagcacttcataaactgtgaagtgccatgcaaataagagacatgattactgtgatggccacacctcgggattaactgcactcatgatgatttcccaatgagactctgattttgtctcaagtgtcaatgaaccatttgctgttcaacaagttttgagcacctactatgtcccaggcattaggagaaggatcggggatacagcattaagacaaaccagccctccaggccggttgcagtggctcacgcctgtaatcccagcactttgggaggcagaagcagccagatcacctgaggtcgggagttcgagatcagcctgaccaacatagagaaaccccatctgtactaaaaatacaaaaaattagctgggcatggtggcgcatgcctgtaattccaggtactcagcaggctgaggcaggagaatcacttgaacctgggaggcagagattgcagtgagctgagatcgtgccattgcactccagactgagcaacaagagtgaaactccatctcagaaaaaaaaaaaaaaaaaaccagacaaaccagccctccattaatcatggagtaggggaagcagataataggcaagtaaacaaacaaaagaattgcagctgtgctaagtgctaggaaagctataaacagactagagggagctcagcctgaggccatgtggtcagaaaggcccctcagaagacacaagtccacttgaggcttgagtatgggaaggagccagccctatgagatatatgttcccccaccccaggttcatacgtggaagctttagaatgtgactgtgcatggagacaggacctttaaagaggggattaagttaaaatgaggccattagagtgggtcctaatccagtctgactggtgttcagataagaagagaacacttgggcacataaagagactctaggctgggtgtggtggctcacagctggaatcccagcactttgggaggctgaggcgggcggatcgcttaagctcaagagttcaagaccagcctgagcaacgtggcaaaaccccatctgtacataagaaatgcaaaaactagccagatgtggtggcacacacctgtagtcccagctactcaggaggctgagatggaaggatcacttgaacccaggaagcagaggtttcggtgagccaagatcgtgccactgcactccagcctgggtgatagagagagacgctgtctcaaaaacaaacaagcagactctttgggtgcaacacgtgaagacgtagggagaaggcagccatccgcaagtcaaggaggaggtctctgaagaaatcaaccctgcaggcacattgatcttggactttcagcctccagagctgtgagacaattaattagattttgttgtttacaccacccaatctgtggtgttctgttatggctgaccccacaaactaatgcagggagcaaaggccctggaccctaacacagcctcacatattccaggaactgttggaaaaccactggctagagcattaggagtgagaataagtagactggcaggaactgaggttgaaaatgtagtaaaagctagatcacgcaagagctatggggccatggcagagtgtggatttcagtgcagtgggaacttattcaaggattttaaacaaaggaataacaagatactgttcgtggagttttttaaaattttttatttggggataattttaaatttatactaaagttggctgggtacagtggcttattttccagcactttgggaggctgaagcgggcagattacctgaggtcaggagtttgagaagaccagcctggccaacatggtgaaaccctgtttctacttcaaaaaaaaaaaaaaaaaaaattagctgggcgtggtggtgcatgcctgtaatccctgctactcaggaggctgaggcagaagaatcacttgaacctgggagacagaggttgcagtgagccgaaattgtgccaccgcactccagccggggtgacaagagcaaaactccatctcaggaaaaaaaaaaatgtatactaaacttgcgaagattgtgcacagggttctcaaataccctctacccagtttccccttacctaaccatgattccactgccaaaactacagacttcattcagatttcaccagttttcccaataatgtacttttgcttctgttccagaatccagattaggacaccccattacattggttgatttatgttttaaaatgtttgctctggctgttctgtggagaattagtgaaaggcaagactggaagcagggagtccagttggtaggctattggaatgatccagaccaagatggtggtttgagctggaaagatggcagaggataaagaggggaggaagggatctattttgaaaacagagtgactttctgttagaattgatgcggggcatgagaggggaacaaaatagggatgatctcaggctttctagctctgcctagtgggcctgggtaagtggtggtgccattgccatcatgggaaacagtggaggagaagcaggttctgagaagaaaagcaagagcgccatttagtcatgatgactttcagataccaatgagactgccaagtggaaatgaggggtaagaagttggatattggccaggtgttgtggctctcacctgtaatcccagtgctctgggaggtcaaagcaggaggatcgcttgcacccaagagttcaaggccagcctgggcaacatgttgagacccccatctctacaaaaaaaaaaaaaaatttaattagctggacatggtggcacacacctgtcatcccagctactcaggaggctgaggtgggaggatcgcttgagcccaggcagtcaaggctgcagtgaaccatgatcaagccaccatactccagcctgggcaacagagcgagactctgtctcaaaagaagaagaagaagaagttgcatatgcatatgaatctggcattcagagagggatgtgggtcatgatttttatctagggagaggagtgacagaaaagagaagtttctagatgctccgagatagagattgcccaggtcctaagaaggaccttctgatggcttccaggtccagcttctcgttgttatctttattccttggttaagactaattttcaatcactgggctgtgcttggttttaggaaataaacgatctcattaatttaaccacaaagatttacttagagagatctaatttctccccctgggtgcctccttcgggtaaattgcataaacatctcaatgtcttgactgggctcaacttgcatggctttggagagaaatgttctcttcctgactacaagtagcttcccctggaagttaccagctgacaaagagggaattttagcatttcaggagagctgtatttattgaggcttgctatgacaatagccatcgtgaagtttgttttctttcttttttattttttgaaacggagtctcactttgtcacccaggctggagtgcagtggcgtgatctcacctcactacaatctctacctctcaggttcaaacgattctattgcctcagcctccagagtagctgggactacaggtgcgcgccaccacacccagctaatgtttatatttttagtagagacgggatttcaccatgttggccacgctgatcttgaactcctgacctcaagtgatctgcccacctcggcctcccaaagtgctgggattacaggcgtgagccaccgtgcccagccgtgaagtctgttttctaattagcacagtagtccctgcttctccgaggtttcactttctgcagttttagttccctgcagtcaaatgcagtccaaaaatattaaatggaaaattccagaaaagaataattcctaagttttaaattgcatgctgttttgaggagcaacatgaaatctcataccgtcctgccccaccccacccagggcacgaagcctccctttgtccgtcaactctgctctgtatatgctacacgcctgttagttacttagtagctgtctcggttatcacatcaaaagaaaaaaaatagagcgtgtatagagtttggtactatctgaggtctcacacatccagtgggagtctcagaatatatccccctcggccaaggtcggggacaactgcatttgtatttgtaactccaagaggacaacatagatggatggatgttaacacatttcaaaatgtactaaaattaatttgtaaagcaggagtgccagtgggaactgcagaatccatatttacaggtctctggagctgattatctcttccttaaatggcttctaattgaggattacagaaagaaaaaaagcatttgctttatttttagacgtgatctctgatgtcttcaacttttatcgttctgtttttaaccttagattattataaccagccacctacaaaatctgcaattttctctaataagtcagcacctgttaaaaaggaggttgcacaaaacactcccatttgcagtttggaaggattattatctgctttggtctgtgaagtggaaagtcaatgttcttattcaatctgtgtctaatggtgtcattttgaggacaatggaaaacagatcatgtttgattccttaagatgtggccactgctatttgtggtacaatttgtgatctgagagctgcatgtaaaaaacacatgagcaaaaagaatatccagcacacaagggctggctttctgattctcagaggtatagtgacaacacagcttacctctgcattcaaagaagctagaacttaccgcggataatcattagtagaagacagcttaaagtagtgtctgctttctggctaggcctgattcacaggtgctgtgataaattcaaaaagacctgcctcctctgatgtgctagtatcaagggtgagggagacagttaaccaaactggtcaaaagcattgtcagcaaagacctggtgctgaatcatgttgggaaactggagtttggagctagagaggcaataccaagtatcaaggtctgaatgtccactttgtaaccactgtagtaataattgactcaaaaaaaaaaaaaaaagccatcaatggatgctaagaccgttgagcaaaacaagtattgggtacaggatatatcaccaccaatgctgggtgtgttagctcacacctataatctcagtactttgggaagccaaagtaggtggatcatctgagttcaggagttcgagaccagcctggccaacatggtgaaaccccatctctactaaaaatataaaaaatagccagacgtcatggcacatgcctgtaatcccagctactcgggaggctgaagcaggagaatctcttgaacccaggaggtggaggttgcagtgagctgagatcataccactgcactccagcctgggtgacagagtgagactctgtctcaaaaggaaaggaaaggaaaggaagaacaggaaaaaaaagacatgcagagaggacaaaccagaaaataatgagattggctacctacagtgggggtgtgtggaaacggggtagagatggtgagagaagcactacctctgggagtatacctttttgaatcattcaacttttgaaatcatgttaatgttttccccactcaaaaataatgaaaccaaatcaacagggattaggcagggggttggtggggtggaagatactaaaatagaattaaaacgaaataaatgaacctaactgtattttaaaagaaataaaatagccacactgaaaaggagagaaaaagacctttcccaaggaattctcaattacacagcactctgactatgtatcctcagtcggaagacaataagaattgtaaacaaatactgaattctaagtaataagtttgtttcttactgtagtatgggctaatactactgaaactattttttgtgtaatttaagtttgagcaaatacacaaccctagggcctacctgtagaagaaaatcaccatttgcaactatcataatagtaattgatttagtagtaaacatcattgaatgctaaaactagtatgtgaaaagtttgatgaggaacaggatatttacatggactaagagtatttctctgcaagtgacttactaatggaaaatggaaatagaaataattttacaatagacagccaggcacagtggctcacacctgtaatcccagcactttagcaggccgaggtgggtggatcacctgaggtcaggagttggagaccacggtgaaaccccatctctactaaaaatacaaaaagattagccgggcgtggtggtgggcacctgtaatcccagctactggggaggctgaggcaggagaatcacttgaacctgggagatggaggttgcactgagccaagaatgtgccattgcactccagcctgggcaacaagagcgaaactctgtctcaaaaaaaaaaaaagaaagaaagaaagaaagaattttacaatagacatacctggtgtataccaccttaaccaaatgtctgtaacgttatcaatcctggaacaaactagcatcagaaatgatatgatgtgctgaaaaagacgcatcacctctttagtgttcttgtcaaaaacaaacaaacaaacaaacaaacaaaaaacccataagctaaatctaatcataaggaaactttacacaaactcagattgatgggattctataaaatagctggcctgtactctccaaaattgttgaggtcatgaaagacaaagaaaggctgatgaattattttagattaaagaagactaaagagatgagactactaaatgcagtatgatcctggactggaacctaaactggagaaaaagagcccaaaggatattactgggtaatcggcaaaatttaagtagggactgaggattagataatagtattatatcaatgttaaacttcctaattttgatcgttgttttgtaatcaggtgagagactgtctttattcttaggaaattcaccctgaaatatctagaggtcaagggacatatctgcaatgttttctcaaatgtgaaagacaaagcaaaagaagcaaatgttaacggctggagaatctgggtaaagggtgttcagggattttctgatatttcttgattttttttatattcttgcaattttttgacatgtttgacattatattaagatttaaagtcacaattatttattgatttaaaaatttttttgggagacagggtcttgctgtgtcacccaggctggagtgcagtggcaccatcacggcgtactgcagcctcaacctcctgggctgaagcaatcctcccacctcagccttcttagtagctgggactacaggagcacatcaccatgcccagctaattttttttttttttttgtagagatgggcatctcgctgtgttgcccatgctggtcttgaactcctgggctcgaatgatcctcccaccccagcctcccaaagtgctggcattataggagtgagtcaccacacccagcgcaatgattttttaaaattaaaattgaaagagcaaaaaatggtataaggaatgtaactaaagataaaagaattttgttataggcagacagtgtgtctaaactgaaaacctaagagaatttacaaattatcttaaatagaatactaaatagttaaaatgatagcaaaatgattatgttcagaagggttactggctatcagatcaacttacaaatatcaatgatattccatatatgagtaataattagaaaatattaatcccatcatcaatagcaacataacattaaggtacccaagaacaaatctaacttttctagacgaaattattatcaaaggacctaacaaagacctgaacaaattataaatactccatgtgcatggagcaaaagactaaatactgtaaagaaataagtgatttcctaaatcagtctccaaattaaatgtaattccaatcaacatctcaacaggattgtcataaattgtaaaatcagatggaaaaataaaagtcaaaagatagctgagacaaattttgaacaaagaacaaggaggcgaagttcatcatatctgataacaaaatcatatgaaagaatgtggtatttgcacaaagatagaaataaacgtaagctgatcatgtgaatttgatacataatagataatgtgtctccaatcagtgggaaggaaagataactttctcagtaaatgacattaagtgagttgacatttcatagggaaaactaaaataataggctggacacagtggctcatgcctgtaatcccagcactttgggaggccaaggcaagaggatcacttgagtccaggagttcaaggccagcctgggcaacatagctagaccccatctctgcaaacaataaaaataattagccaggcatggtgatgtaggcctgtagctccagctacttgtgagactgaggcaggaggatcacttgagcctgggaggtcaaaactgcagtgagtcatgatggcgctactacacttccatctgggcaacagagaaagaccctgtctcaagaaaaaaagaaagaaaagaatggatccctacctcactccatattcaaaaataaattccaaaagtgtttacaaacctgaccatggaaaccattaaaatcatttaagaatatcttatttatggatgcagatgcatttatatgttacataaaatacaaagtttattttaaaatgtggactaagttcacaataaatttatgatagctgtcagccaggtgtggaagaggaagggatttcaactataagtgtgaaattttctcttttttttttttttaagtagggacagaatcggaatcaaatatgacaaaataattacatatgtttgactggtgggtagtggctgttttttggctttttgattttttgttttgttttcttttttagatggagtcaccctttgtcacccaggctggagtgcagtggtgtgatcttggctcactgaacctctgcctccagggttcaagcgactctcctgcctcagcctcccaagtagctgggattataggtgcatgccaccacactatgctaatttttacatttttagtagagacgaggtttcaccgtgttggccaggctggtctcaaactcctgggctcaagcaatctgccctccttgaccttctaaagtgctgagattacaggcgtgagccatgttttttatatgattttttatattcttgatattgatcttttgagttttgaaaaagaaaatattcatctgagtcttctgttccatgaaactcaaacctctttaattctttgtgatccactgttagcctcagtcactggctctgcagttgtttcccaaatgtttggctccttttccccctcataattactgtgggaatacagtgtacgtcacttaaaaaaaataaggcacagctttgctgtttatttacctagagctttgtgtttatgtttgttgagtccagtggatggtgccttggtgggtggattgctcatgacagaggatggacagcaatcttgggtcgtggagcattttggtggagaacacttgaggaatctgccaaaagctagcagctggtcaggcccagttagtaggattctgtactagaatcagagaaatcaccagccttcgaccaaatagggtccaaagcagggctctgcagccaagtgataacgggacttcgctgttctgaacttccccagctgtgtaaaggggaaaatggcacccacttcagagagaattgagaggatgcagtgagatgctgcatgtcaaatgcttcataaaccatagttctcttttctctttcacttcagttatacctcatgggaaccacttcagagtggactcttggagatccacaaatggggaagtcagtgtaacttggggagtccaagttctcacgtttctgaagtctgcagtccctattcctttttcaccacccagaggcatcctcagacatgagttgataagtcacgtctccagggacttttgagttcactttttcaaagtggagaaaggagtggttactggtgcaagcagcagaccctctgccttgtggcctcctgcttggaggttggggattctggtttcagacacagtccttccttgggttttactcatctgtaagggatcctgcttggcacagctctgttccaagaggtgagagccatctatgctgttgttcccagttaatcatcaacagaaccgtggcagaatggagacaggatgaagactgtaggcactagagtcaaaccaggtgtctttgaatcccaagtcaactccttagcagctagttaagtcatgttacttcacttccgtgtgcccctgtcaaatgagtatcatgatagttcccactcatagggtacttgtgaggattaaatgtgttaagcctgaaaagtgcacagaatagagctttgtacacattttagacattcagcatgttttaacacggccattgtttttcatgttttaacaactttacaaatgaaacgcatattagagttgatggcatgttacaattacaagtggcagcattttttctttttcggtggtatagttggtggcatcttagaatcaatgaattaattcagcatgatatctccttttgcataggatattgagatgtacatcatgagtgcatttcagtactgaatagtgtttgcatatcaaatgtgaacactgaactgaattctgccaaagtcaagtcattgaataataagctattcagttgttcaggcctggaaggttgtttgttaactttttccagggcactggctggcttcctaataatgcaaatgacttgatagaactctgaaaagggaaccattgaatcttcttccccttggacatccagagccatcatctttataaaatggatttcttactaaaaatccctggatgccatctatctgatacaccttcaaggacaaagtctcagctagtattttagtttttttttttttttaatgtggggcaaggggataataggagctgagcttacagaaaagaagttaatgatttccaatggacatgatttcaaagcaatttctgccttttgatgcgctgaaatcattgcttccatctgctcccctacttgtacacagggctctgctttttaaccatgcagtgtgtcagctgttgcccaccaaattctgcacttgatcttctgagactgatggcgattctctatgaataatattaagctattaaatcacatttaaatcctatttctccactaatacctattgaaggcctgtttatattccatcagatttttatggccatttggtacataaatttgttaaatataaacttcatggagcttcatctgaaaatgtttcatcttgttcccagtcctgtaaagacatggtcataaatacctttggactatgcaaaccattatctagagtaattttaattatctttagctatgccgatcagatgataataaatagatgttgaaaagcatcagcaaaatgccatcatggaagagatactcaggggtaaaaccaaataattgaccatttggtgctgaaacattttattatcattcctacaaaggttcagaaatctatcatgagattgggtttgttatgaactcaacatcaccttggttgggatgtcaaaactagagtaaattattgaaatgaaatatgaaacatattaaggaacgtcctcgggaatgaaggacactggaaagactgaattttctagtaacttaatttcgatctatgggtgaagctttgttttcagcacccagctatatttgcttggaaccatctgggtctcttggaatagataatgttaaaccagatacactagttgtacacgtggtatgtctttattgggggcttttggtaacagtttaagatagaaaaaaaagtattgctttaaaaaaaaagtgatccttggtactcacgggtaacaacattctgctttggctaagagtttacgtaactgcatactgttccctatttctttgttgttgttgttgttttgtatttttgttgttattgtttttcttttgagatagagtctcgctctgtcgtccaggctggagtgcagtggcccgatctcggctcactgcaacctctgcctcctaggttcaatcgattctcctgcctcggcctcctgagtagctgggattacaggtgtgagccaccacgcctggcttgagagatggaagatcagactcgatttgctcatgttgttcctaacctttattctaaactgataaaaatgtaaagtcatctgatttcaagactgattgttcccttgggtgttccttaattccctagaggccgagtaaattcttatggtttaaaggctcttcccccttgcttttctatactcccttgggtttgtttttaaaatgatagtgttctgaaccaatttttttttttctttttgagacagagtcttcctctatcacccaggccgtagagcagtggcacaatttcagctcactgcaacctccacctcctgggctcaagtgatcttctcacctcagcctcccaagtaactgggactataggcacttgccaccatgctcgcctaattttttaattttttgtagagatgaagtcttcctatattacccaggctgatcttgaacccctgggctcaagtgatgcccccaccttggcctcccaaactgctgggattataggcatgagccaccatgcctggccccaaataatttatataagccatttatcatagttcctgacatatcatagatgttcagtaaatatcaattatcttcctcaggctgagcatggtggctcacgcctgtaatccccgcactttgggaggccaaagtgggtatcttacttgaagtcaggaattcgagaccagcctggccaacatggcaaaaccccatctccactaaaaatacaaaaattagccaggcgcggtggcacacacctgtaatcacagctactcaggaggctgaggcaggagaatcacttgaatacgggaggtggaggttgcagtgagctgagatcatgctgctgtactccagcctaggcgacagagtgattgagactccatctcaacaaaaaaaggaaagaaaaaaacagttatcttcctcaatccctttgtgttaagttcctagtggaaatttgagaagtcctttattttacatttaaaagataggatgcttttaatggtgccttaattcatcgtacaagaaacatttgttaaacatctattcggcaccaggggttgttaggctggtggaagggacaggtactctcattgcaaggcagtggggtaggctctatggagaacacatgctagagggtgagaatgggtagacaggcaagatcgtgatgcagggagagactggtagagaacacaggagatttttgcagtagatcagatgatagagaatgcagcccgagatttaaagcagtgacagtagaaatagagaggagacgctgggtgcggtggctcatgcctgtaatcccagcactttgggaggccgaggcaggcggatcacgaggtcaggagatcaagaccatcctggccaacgtggtgaaaccccgtctctactaaaaatacaaaaattagctgggagtagtggtgcgtgcccgtaattccagctacttgggaggctgaggcaggagaatcgcttgaaccagggagtcggaggttgcagtgagccaagatcacgccactgcactccagcctgagagtgatctccagcactccagagtgagactccgtctcaaaaaaagaaaagaaaagaaaagaaatatagaggagagaattaggaagacagagagagattggtgcctagttaggatggagcaattagctcagtggtctgagataattcaggtttttgtaacgaatgggtgttcgtgctaccaactaaggcgaggaattttttttaagtggtttaggagatgccatggtgcccctcacccccaaattcctatgttaaaatcctaatcaccgcaaggtgatggcattaggaggtgaggcctttgaaggtgcttaggtcttaagggccccagagagaccccttaggttttaagggccccagatagaccccttgtcccttctaccatgtgaggacacaactagaagttgctatctgcccaggcatggtggcttatacctgtaatcctagcactttgggaggccaaggcaggcagatcatctgaggtcaggagttcatgaccagcctggccaacatggtgaaaccccgtctctacaaaaaaatacaaaaaaattagctgggcatggtggtgggcacctgtaatcccagctacttgggaagctgaggcaggagaattgcttgaacctgagaggtggaggttgcagtgagccgagatcacgccattgcactccagcctgggtgacaagagtgaaactccatctcaaaaaaacagaaagaaggtgctatctatgatccaggaagtgggtcctcacctgatgccaaatctgcctcgatcttggacttctcagcccccaaaactataagaaatacatatatatatatatatatatatatatatatatattttttttttttttttttttaccatgttggccaggctggtcttgaactcctgacttcaggtgatccatccaccttggcctcccagagtgctgggattacaggcaagagccactgtgcctggctaagaaataaatttcttttgttcacacactacccagtttatggcattttttaatagcagcccaaacagactgagacacgtgaggttgatgaattcagtttttgtccagttgagtttgaagtagtcacggaaaacttagtgaaataaccggtagggaatttggtatataaatccaaagccgagacctagagatacagatttggaagtcataaacgtagttttgaaagcatgagaacagaggatattacccaaaggatacatgagggataaaatgaaaagaagggcaaggatggaacctgggggaatattgacgtttaatgggagggaaatggaagagcatctcatagagatggatgagaaaggagcactctgagagttaggagaatcgggatgcctgggagtcacaaaggcccaggaaagtgagaacaccaaggaagaaattgtcaccagtaacagcaacagagttccgtgaacacagaatttaaaaggtcctgtgagaatgagcaataaggtcactggtgacctttatgaaaacgagagacatggtggagttagaagccagcttgtagtatcctttgatgcttggctgtagaaggaaggaaaagaattggatcagaaggggacttagagtggaagggagaagcctttgcaagatttcccatctctgtggaaaagaagttcatgttcgggtgtatctcctctgttccaaacgcatagcagtgacagataaaatacaaagagagaaagccaaagtgatattgctggactcgtggatcaaaaactcggaaggatgagggtagcctggattgactggaatctgggtcttggggtcaggcaggtattgatgtaggtcttttatggcaataggactaaaagtactcaatgcaagctgggccaccagagccagggtcactgtttgaaaaaagaggctggaggtaggcctccccaccctcttttcattctttcaggtgaaaggaacctgaaaagaatcccctgtgtctgatgcctgggccatggcttacagtagtagttctgctcttagaaggcaactgtaaaacctagagattggtgtgaggagtcagggagtggaggtggagaaaaaaaagcagcaacagtgacaataacaacaaagcctcccactcaaaaacgaccccgcaaatctaacattaatgaagacagccaaggtatcaacagtcagaatgtaaatctactgccgaagaaaataactttgtagacagacctgattaaaatagtatattcgggctgctcagagggaaaagtaaaggaataatgttcattttaaaagaatgagaaattaggaaccaaaaaagaaacaagaacagaggatttgaaaaagaaccagtttgaaattcagggactgaatcattgaaatgaaatctaagtggatcagataaactaggctagatacaactgaagagataattagtgaattggaagatattaatagtattgagaaatacaacccatttcatagcacagaaatacaaagaattttttaaatacatagttaaattagggagaaagaatgagaattgccatatagctaactcataggagcagaaaaatattaggttggtgcaaaagtaattgcgatttttgccattagttttaatgcaattacttttgcaccaaccatacaatggaggaaataacagaaaagcaatatttgaaacaataaaggctgagaattttctagaattgaagagagacataaatccttacatcaacgtatatttgagtaataacaataatggtaaacacttatttagcccttatgttccagaccctcttctatatgctttctatgtattaactcattaatcctctaatatcccttggataagagtaatttacatgtgagtaaactggaaaagagagaatgtgtgtagtttgcccaaggtcacacaactgggtggtgggatttcaccccaagcagcctggataccctctaatacttctctaaatcctaaagggattaaaaataaatctatacctggacacattgtcatgaaactgcagattatcaaagatttttttttaagagctcctctagaggaaagacagatcacgtacaaagggacaatcctcatcctaatagtggacttctcattagcaacagctggtcaatgaagacaatgaaaggagagattctaaaacccagggcaaggcatagaacacaagaaacaaatgtgggcctatcaaatgatacaatgttatacattaacttaactgtgaaatactgaggaaggagctggtaggccagtgagtttggagttacaagaggaagagcagctgggcaccccgtggctcatccctgtaatctcagcactgtgggaggctggagaaggaggatcactttatcccaggaactcaagaccagcctggacaacatagtgagaccccatctctacaaaaaaaaaattaaaaaatttggcaagcatggtggtgcgtgcctatagtcccagctacttgggaggctgaggtgggaggatcacttgagcccaagaggttgaggctgcagtgagccatgattgcgccactgcactctagtctgggtgacagagcaagaccctgtctcaaaaagaaaaaggagggaaagaaaataagaggaagagcctgcccccgggaagccagaaagtgaatggtcttcgtgaacctctgaaatagaaggaaaagcagggcaggcaaggagggggagaaggggcagagagtgacgagcacacgcagaaggtctctagtttccagtaatatgggaagaaaggtcatctcctgtaaaggaaggggtcaggaaagagggggctgaaggagggtaataaaggtcaaagataacctttatgggaaatggatgagaagcgtcaaaggattgcttgaaagtcttggcagtgtggtgatttgggaaatgttgaatgagtggtaccatcagcctacataattgtggcgttttcccagctgtgctttgcagcctgcgtgtaggagcacaggaaatggttgaattgattcaggatttgtcttcagggtaggttcagcaaagtatggaaaaattgagcaagtgaaggtcaaaatgagctttggagtccagtgaagactcttgggaattggagagcttggtgaggtcaaggagaaagtgtcctgggagtgagagtaagagaatacaggttggggttggagcaaaagtaactagagctttcagatttcagaagtggaataattccaggagattcaagaccccagtggagcttgaagggaagtggttagaggtggaatggaggtgaaggtcgttggaggagaaggaaaggaaaaggaatgaggaggctgggcctatagtgttgatgggctgcccatgtggacactgaaatcataaagatgtggatataaagtagggtaaagtggaatcctgggcatggtccagagagttcatgaagccaggggtcaggtggtctgtaaataacagcagtcatcatcaatcaccaatgaggcgtgtggctagaaagcaggggcctggaggaggagggccctggaaaagtgccactcattctacaagtgaccactaaccttgggaatttttttttggtggttggggggatggatcttgctctgtcgcccaggttagagtgcagtggtacaaccttggttcactgcaacctcgacctcctggactcaggtgatcctcctacctcagtctcccaagtagctggaactacaggtgcataccaccatgcccagctaattttgatattttttttttgtagagatggggttttgccatgtttcccaggctggtctccaactcctgggctcaagtgatcctcttgcctcaccctcccgtagtgctgggattacaagcatgagctaccacaccaggcccctgggtcacctcttacaccagagccagtgggttcatttgatcaatctgagcagtactcacaggattcaattgtcttctcacaccttttccccaggtttcaaagtcagagccacttgctgacttgagtgattatggcagggccccatctaatggcctttttgcaaagtacagctggagcaagcaggctcgcctgtgccccttttctcatcaaaagcaaggcaaagagggtatagattagactagcaggccccggctaggaagtaacatcttcaagagtaagaagtaatcatgatggcagccatgtggatattgactcataataatggtgatggtcagacggatattggcaggaatatttacatgagcccagcatcttgccaacctgtctttagatagccacagtctcatgaaatcttcacagatattaatatccccattttacaactgacactgaggcttagtgagagccagcggtctgcacagcctcacagctagcaagtgtcagatctaggactcaattctaggttagtttagccttggagcacgtgctctcatgtaactaatctgctgtctttggctctaaaaatgaaataagactgtaggtagagccaggcgcggtggctcacacctgtaatcccaacactttgggaggctgaggcggacgaatcatttgaggtcaggagtttgagaccagcctggccaacaaggtgaaaccctgtctctactaaaaatacaaaaattagctgggcttggtggtgcatgcttgtaatcccagctgcttgggaggctgaggcaggagaatcacttgaaccagggaggcagaggctgcagtaagccaagatccaagatggtgccactgctccaacctgggcaacagaacgagactctgtctcatagatttaaaaaaaaaaaaaaaactgtacatggagtcagctgctctaaagtctggttgaaagtttaaattttcacagtgaggaaagggaaataagtcactcccatcttaaagaagcattgtcaaaggaatatttttctccttccaagttttacagggaggcaaatattctgaaaggaattatcgtggtaataacatcccttacctgatttttttcaaaaacttttattactaggaattttctcagatgtaatgccatataatgggtgtttatcaactggaatagtgagggaaaatggctttccagccatgtgtctagtttttacacatcttcagacatggatggaaggcagagctgggttgcctcaattctgggtcaagtcagcttcccctggattagaaggggaggctggtaggctaatagcaggatgctggtgacatatgaaggaggggttgtttcttatgaaagcagattctcagagaaagaggatctgcgtaggaacaccagagagattggcctcaaagacccaaaagcaaaagaaataagttaaaaataaaacagtcctaggccaggcacggtcactcacgcctgtaatcccaacactttgggaggcccaggcgggtggatagcttgaggtcaggagttcgagaccagccttgccaacatggtgaaaccccatttttactgaaaatacaaaaattagccaggcgtgaaagcatgtacctgtagtcccagctacttgggaagctgaggcacaagaatcacttgaacccaggaggcggaggttgcagtgtgctgagaacttgccactgcactccagcctggacaacagagtgagactccctctccaaaaaaaattaaaatatgactgggcatggctcacatctgtaatcccagcactttgggaggctgaggcggacggatcacctgaggccaggagtttgagaccagcctggccaacatcatgaagccccatctctactaaaaataaaaaattagctgggtgcgttgggatgcgcctgtagtcccagttactcaggaggctgaggcaggagaatcgtttgaaaccgggaagcagaggttgcagtgagccgaaatcgcgccattgcactccagccagggcaacagggtgagattctgtctcaaaataaaataaaataaaacaaaacaataaaataaaataaaacaaggctaatgataaacccaggggctccttggcaggagcaaagctgaaccgagagctctattcctagagccctatgtctgaataatttatttttcctatctcatagtccctatgtgccttcctcagctgagatcaagtgccaaaggacatctcaaaatacccacagccaaaacttctcagcatagctccctgcatggagaaggagacagctctgcaagtctttgtcctgaaccgtttacggattttccatggtctgcaagaccttggactcacgccgcctgccagctggcagccgctgtccagcctgggaacagagcttgctccggcctgtggcgagtcctcccggggcttatcgtgaatttccccggttttgcatcttcatcctgaaaacctcccgacctttccttaatgaagattttagctgggggaaattgcattagtggctcgtgtttttctgtcaaccttctaaattatgttagttgtaagtaaaaagagtacagtaagtccttttatccgttgtgggctgttcctgggaatcataatggacaataaaataataagtaatggacaggaagatgctcttagaaccagttcggaaaactcttccagtgccagacagaaaccagccacctgcgccgttatcaggacatcaagtgaagccagtaaacacttgtggagctccttttaagtcccagcaccaaagaataatacctaacacttctagttaagagagcatcgtactgagtattatctcagttaatattcataacagcacataagttcaatgctcagtttgcagatgagggaactgtggttgagagatgtttttaatacactgcccaaggccacacaatgaatagctgacaaaactgagatctggggtcttttgattgtgtgtctttctctctccacactccacctcagctgctcagaagcagatcctggggccagaatggacctctgtaggaagcctcagagatggaagctttctgccctcaactggctgactgaattgatggaacagtgggtgataagcgagggaattatttcgtagtttggttgaaaaaaagtcttcagcatgtaaatatgtcttacataagtcatgaaaaatgggactgaaagaaatgagagacaagagggaaaagacagaagtattttctttatcaaaccttggggaaaagcatcttttcctcaaatacccaatgcagtatgtatggtttttgttgttattattaagacaagggaccctttttttacccagacccaaattcaactgccttcaaagagatgggacaatgttcttagagagtgaagtttcgcactgaaaaccagcttttccaaagagctccaaagagcacgtttaaattcggctaagtcggagacgtttgcagatgcaggcctgagacccctggcccacacttggatgacgaggcgtaaagtgaggaccctttgcctgtaaggctgtgtctccatctcagaaacctatttaaagccgaactttataatggaaacacagccacaacctgctatcagcaaccacgatattaaacaggcatagagccaatagcagtggcgtgaagccagcgaggaaagattagcatcacaagtaagagattttaggctcagggccagaagagggtttttttttttcttcttccctttttattaaaaaataataataaaaagggagagagaaagaaataaaaagaggtggaaaggtgcaaaagaattcctgtttagccaccctccctgagattgttctccttggttatccagataagtacagaaacaaaccactgcctgtctgaaaacctggcagtcgcttgaccttaaaatggtctctgcaataacccttccaacctgctccgctctcctgtccttggctggcccatgtgcagaatggagcgtgtgacctccagcacggggaaagtaataatcagtaaggttcatattttccacttggagttagaggaaagaccatgtgagcacaactttgggttgctatctttttgccctgcgctgctgtaggaagagacatgcagtggttggaagtctccctactggcagagcgtcgttccagcacccagtttgactttgtgcaagatggtgcttttctgactacctcctccctttaagctgcagccttctgaaatctcagctttcaggaaaggatgccagccccaggagttataggatgcagcagagcaaaggtggcattttccaggtgagcttcgggactgccccccttgggctctcccatccaggccatgcagtgctgactgcccatagcttgaccgctgcagatggacagggggtgctctgttgtaagcaactctcagaggctaagtgacgtgctcaatcttgctgcttgctccaaaccagcacaagattttttgtagccttcttttacacttcttatttggaaaatttcaaacctacagagaagtttgtaagaagagtgcagtgattctggattcaccaattgttaacatttttctccatttgctttgtctcttcctctccatacatatttacatcatttcccccaaccccccagaaccctttgagagtcatatacagacatcatgactccttaacttttttttctttcttttttttttttttgagatggagtttcactcttgttgctcaggctggagtgcaatgctgtgacctcggctcactgcaacctctgcctcccgggttcaagcgattctcctgcctcagcttcccgagtacctgggattataggcgcccgccaccatgcccagctaaatttttgtatttttagtagagatggggtttcaccctgttggccaggctagtctcaaactcttgacctcaggcgattcacccacctcggcctcccaaattgctgggattacaggcatgagccaccggccccggcctgaccctttacccttgaatacttcattgcgccctaagaacaagggctttcccttacgtaaccatcgtgcagtgcttaggttctggaagcttaacattgatacaatactattatctgatagagaggcatatttacatcttgccgattatcgcaaaatgttttttcaatagcaaataaaaactttaagaaattactaaatgtcaattaaaaaaaaaaaacaaaaaaaaacaaaaaaaaaaaaccacttcctaacttgcctagctactcaggaggctgaggcaggagaatggcctgagcccatgtgttcaagtccaacctgagcaacatagtgagattctatctcttaaaagttaaatcagtaaataaataaacattcatgattcatgttccagtagaggctcacacattgcatttaattgtcactttctttagtctcctctttaatctggagctgtttctcagcttttttttttttttttgagacagagtttcactcctgttgcccagtctggagtgcaatggtgcgatctgagctcactgcaacctccacctcttgagctccagcaatcctcccacctcagcctcccgagcagctgggactacaggcatgcaccgtcacacctgtctagtttttctagttttttttttttttttttgtagaaatgaagtcttgctatgttgcccaggctggtctcaaactcctgggctcaagtgatgtgcctttctcagcctcccaaagcgttgggaggcatgaaccatcacgcccggcctgtttctcagcttttctttgtctctcgtgacactgacattttgcagaacactggctggttttgtgcatgtccttgttgctgggttttccccattgtgttctcatgattagattcagactgtgcatctttggcaggaattctgtattagcaatactgagtcattgtggactttcagaatatcctttccccaacatgcatggcttccctgtgattttatttatttatttatttatttttattttttgtagagacagggtcttcctatgttgcccaggctggtctcgaactcttgggctcaaactatcctcctgcctcagcctcccgaagtgctgggaacacaggcatgagccactgtgcacagccttccctgtattttattttctggcctttgagaagactttagcctcccctggtttcccaagctgtgttcatcacagagctggtgtcggaggcctggtgggagagttggtcatgttcttcttcttcttcctttttttttttttttttttgagacagagtctcactcttgttgcccaggccgggtgcaatggcgcaatctcggcttactgcaacctctgcctcccgggttcaagtgattctcctgcctcagcctcccaagtagctgggattacaggcatgcgccaccatgcccggctaacttttgtattcttaatagagacgggatttcaccatgttggccaggctggtctcgaactcatgacctcaggtaatccgcccacctcagactcccaaagtcctgggtttataggcgtgaaccaccgcacccagccagtcatgttcttctaagcactggagaaaaaaggacagctgcctgtgctgaaaagtcaccccaagagagagcaggaagaatcccaaagcagaggcgacagtggactctttctatcctgtgctctgagtccggcaaactgttgatgaagccctcacggggtcattcacagcagaattggatctggttagatccaattccaaaaaaaaaaaaagccacatcccttggatccaggtttgctttttgtacccaagcttgggcattccatttggatggttttacctcttaaatattacatccatcctacttctccattccggctaccatggccctagttaaggtgtttatttcttttctagagcaatctcacactaaacccatatctcccacagagctatctgcccagggaatccacgtagacttcaaatctgatcattttcacagtgactggcacccaagaccttctgtcgcccggccactactttcctctgtcgttccgctattccatgctccctgcctcaaacataatatgcccaaaatatcaggtcaggatacgagagtgttaagtgccagcattacctgggagcttgttaggatctcaggccccaccctagacccactgaatcggaacctgaatctaagcaagcaagatttcccaggtgttgtgtgcgcatgaaagcaccggaggcactatctagaacctgctggaagggcctgttctgtgcaaggaacttaagctgcccctcaggctctgtggtccttggcactgaggcaagattctcaaaataatctctgattcaagggattccgctccgaaaattacattggaaattgtttttcctaatttgcataaataaataaacttagtaaatgggcttcatctgatttttacttttttctcttacaaattcttttctaaactttgggccaggcgtggtgccggcacacatcagcattttgggaggctgaagccagcagatcaccttgaggtcaggagttaaagaccagcctggtcaacatggcaagaccctgtctctactaaaaatacaaacattagccgggcgtggtggctcacgcctgtaatcacagcactttgggaggccgaggtgggcagatcacaaggtcaagagattgagaccatcctggccaacatggtgaaaccctatctctaccaaaaatacaaaaattagctgggcactggggcatgcgcctgtagtcccagctactcgggaggctgaggcaggagaatcgtttgaacccgaggggcggaggttgcagtgagccgagattgcgccactgcactccagcctggcgacagggtgagactctgtctcaaaaaaaaaaaaaaaagaaaaagaaaagaaaaaaatattattttctaaactttgacatctgctgctacttgttggctaacaagatgtcatctgctggcaaacaaaatgagtaaactactaggaaataaatggtaatgttaaaattcaacatacctggtgttcagtctaacagttcagttcaacaacagcaaaaaataaaaattaaaactttgagtgttaagcttctattaatgtatgagatactagaagaaggtctgagggatgcatagatgaatgagatatattgtatagcttattccccatgactgtaaggccacatgtgcctgtagtactggggcactgaatggtacttcagcaatgaccatccttttattagaatccttgggatgctactagtctggatttgcagaattcaccaaaatgaatgacttttgctattacctgtcaagttgatttcatcttctgtgtccagacagctatccaaaccaatataaccaggaaatttactctggattcctcagatcaatagatgaatggttttgttgttgttttgttgttgtttgagacggagttttgttcttgttgccctggttgcccaggctggagtgcagtggcgtgacctcagctcaccgcaacctccgcctcctgggttcaagcaattctcctgcctcagcctcccgagtagctgggattacaggcatgtgccaccaccacacccagctaattttgtatttttagtagagacggggtttctccatgttgatcaggctggtcttgaacccccgacctcaggtgttccacccacctcagccttccaaagtgctgggattacaggcatgagccacccggccaatgaatggtttttaaaacaaaaatcacaatgagcctgttgccttttattggctttggttttaggaggagaaactttaaaagcttggagttgaaggataatggttcaacctttcttggcgtgtaagtgatttatgacctcctaatttaacgaaagtaacaacagcgaagacaagccacttattagcgtttcctggcaattccatcagggagataggggttggggccttgagagcccaagaattaaacaacagctgaatgttattcaaaatctaaattcattatacacattgttgctttactaaaatctttactaaaatgtgatcaagaaagccttggcagggcacggtcttgaaagatgagtaccaactcatcttgggcaggcagatatcttgccaggcagatagggtggggagagccttcagggcaagggaggagcaagggcaagagtcttgaaggctgaagagtgagcaggatgtggagaggaagtttcaggctccacagggtcatgggggcaggcccagagcaaggaagagagaaaggagggtgatccagggaggtgagttgatgagaggaggcagatgtactaagtccatacatgagtgcagtatttgacagtttgcaaagcaccttcatacccactatctcaccaggtcctgctagctcagtgatgaggtgggacacctaacgtcctcacttccaggtgatgaaatggaggcctggaggagtttctaaagtcgtacaactcctaagtggtggagccaggattagaatgagatattttgacctctggacactgctctttccaccataaactgatatgttccaggagcattgaagaaagcttcctagcatattgggaagaaaactcatggttggggtgtggctgggtggatggatgggcggatggatggatggatggatggatggatggatggatggatggatggatggatggatcaatgggtggatgtggagatcagagtctcaagagaaaaagagttaagagtccagcagttgtgcaggtgagatgggggattcaaacgtctatcaggaaggtggatttgtgagatacagaggcagtggagtgaatagaacttcatgtctgaccacatgtgagaatgagaaagaaataagagtgtaatggccggacacagtggttcaggcctataatcacagcacttcgggaggctgaggtgggcagatcacctgaggtcgggagtttgagactagcctgaccaatgtggagaaaccctgtctctactaaaaatacaaaaaattagctgggagtggtggcgcatgcctgtaatcccagctactcaggatgctgaggcaggagaatcacttgaacccaggaggcagtggttgcggtgagccgagatcacgccattgcactccagcctgggcagcaagagcgatcaaaaaaagaaataagaatgtaggataacacccaagttttgaccttggatgattaaaggaccacaaaggaaaacaaacttaaaccttacagccaaagtggtaaaggtagagatgatgaatgttaacttcgaatatgtctaatagtcagttgatatcaatggatctggaattcaggaaaagtgtctgagatatccaggagattcattaggtcatcagcgatcaaaggttagcattttattatagatgttcactgtgttattataaataacgttaaaaaagagaaaaataaaaaggaaaggtcttaaacatgtaacagttgcagattggctcatttatgttacagccatatattgaaatgcaattcagaccttaaaaatgagtgctggctttgggaggccaaagtgggcagattacttgaggtcaagagtttgaggccagcctggtcaacatggtgaaacctcatctctaccaaaatacaaaaattaaccaggtgtagtggcatgtgtctgtaatcccagctgcttaggaggctgagtgaggcaggagaattgcttgaacccaagaggcagaggttgcagtgagctgagatggtaccactgcactccagcctgggcaacagagtgagactccgtctcaaaaaaaaaaaaaaaggagtgctggtttaggaggtcaatgctggaggatcacttgagcccaggagttcgaaaccagtctgggcaacatggcaaaaccctatctctacaaaaaaaaaaaaaaaaaaaaaaaaaagtagcctatattcccagcaactcaggagaccgaggtgggaggatcacctgagcctagggaggttgaggctacagtgacccatgatcgcgccactgcactccagcctgagcaacagaacaagactctgtctcaaaaaaaaagaaaagaaaagaaaaagaaaaaagagcgctaggcttgtgggtgctttcccttccttggtgatactaacatctgtcgctggcagggtacttcccagcccagatcaaaatgaagtgggctttccctactttatgtcctcagatcttctctactacccagtgagggacgaactgacactttattacggaatcacagatgagattccagaataaagattctttattctttccaaaataaagaagtagtatgattgtgataagaaaaaaggagaaaagaaaatgttattaaaaaaattggccaggcacggtggttcacgcctataatcccagcactttgggaggccaaggtggggagttttgcttgagctcatgagctcgagatcagcctgagcaacatagtgaaaccgcatctctactaagaatacaaaaattagccaggtgtggtggcacatggctgtagtcccagctactcgggaggctgagggaggagaatcgcttgaacctgggaggcagaggctggagtgagctgagattgccccactgcactccagcctgggcaacagagtgagactccgtctcaaaaaaaaaaaaaataaatatataaaataaataaaaataaattaaaaatgacatcacagcccaggcacaatggctcatacctgtaatcccaggactttgggaggttgaggcaggaggacagcttgagccccaggagtttgagagcagcctggggaatatagtgggaccccgtctctactaaaaaaaaaaaagtttttaatgacatcacagacgccagaattgattcacgagagtatatgtgagagctggtctatgaaggcaagagtggcgggtttctccccattggggaaaaatagaaacaacaggcccacccaggggcctcatacctaattctaccacaaccctgggaagggctctggaagccaaaccctccccacatgctagccccagcctgtcttacccgtgcctggagggttccttctggagtcttctgggcagctgccctggggagcaggggcccgtggagctcagccaggaggccttgcgtagtttgccttgggaggttattacagccaatccacatagatgcgaaaaccaaaccaaacacagcctaccaggaacaagtaacgatttgttcctttcttttgctttttctgacagtagatgcaatctatcgtgattcttaagtgtttttgggctagtgcccattccattgtttttgcccagagaggctcaccaggaatgagctggaaggagacacaagcccctaagtacctcgggacgcttgcttggtgaacaagaggaggaaactcagagagcagggctgccggcctccttgtctttcgatgcctcgtgtggccaccccaccgcacgagccatagccagccatctgtctcagtatttcattctcttgaggctgagctagtgtagtggctgtgtcaggaaccctgcctgtttgtgcaaagaattcattcttccaagaaggatgaggatcaaattcacctccacatggcacacaccgaacaccgaggctgtgaaaggctggcccgtgagtgtctccaggttcaatatcgatttgtcaattgtagagaaaaccagcagttctagttcccagagaccaccctgtgaattgaaataagaaggaacggggagaaattggagctatttttaagctcagcttctgaggcttattttaggaggcattattgatcatacttcggggaaaccgttctgcgtcgctggtgccagtgtctacatgtgcacatgtgaagtgttggcctagactcctgagaccatctgtgtgcccaagggaggctgcagcccagaggagaattcggactgaggctactttgcaccaaaattaggccaaactcatgaaagggccattgttgcagctgccctgggaactgtaacttagaagtgattttgtgcccttacagcctctttagtaaatgaattgagtcatagcatttgtgatccttccgcatgtactttggtacttttctgtacttttctgtcctcttttttgtttgtttgtttgtttgttgagatggagtttcattcttgtcgcccaggctggagtgcaatggcacgatctcagctcactgcagcctcagcctcccgggttcaagcaattctcctgcctcagcctcccgggtacctgggattacaggggtgcactaccacgcccagcaaatttttgtatttttagtacaaaatgggttttaccatgttggctaggctggtctcgaactcctgacctgaggtgatccaccagccttggcctcccaaagtgctggggttacaggcatgagccaccgtgcccagcctctgtcctcttaatgagttaccatgatctagggcacctgattagaacgttgtttttccaaacagcatctttttctcatcggtcactgtatcactctgatcactgccccttgaatcttcttcctcaccctttatttcacccagatgagccagggtttaccgtatgtgggacttcaggtcatggcacaaaatggttctcaacccttttgttgagcaccggtttgctggtgctctttttagacacaaaccctggaataaacgtgccctttccctcaaagggaccccactgtggattcctatccactttgttatcctttttactcttagatctctgcctcaccactttcccaggcagcctctgctttttcatcttactgttctcattttcgcctggtgcgttcgtcagcggctttttatgttaaacttcgcagatgagccacgcctgaagttattcctgtccttctttctctccggtgtattgttgttgacaggtttttatctgttgttttgaattttctgtgacctttggggtgggcagagaaaaaaaaggacaaatgtccaccatcggccggtctgaacgccacatttaatgtgttctttttgagtgttctaacccttccttcttcctgcacacatttaataacagagaaccaaaaaaagcctagttgccttcattcatgaatatttgggacagtgaggcctcagggaaggccagcttttctggctacagggacggtcttaatctggagaatggaagaaagaggtcctttaaaaaccagagagttggctgggcacagtggctcatgcctgtaatcccagcacttcgggaggccgaggtgggtggatcacttgaggtcaggagtttgagactagcctggccaccatagtgagaacctgcctctaataaaaatataaaaattagccaggcatagtggtgcacacctgtaacccagctatttgggaggctgaggcaggagaatcacttgaacccagctgcagagtttgcagtaagctgagattgcaccactgcactccagcctgggtgacagagcaagactctgtctcaaaacaaacaaacaaaattaaacccagagagttgtaatagtttcccagggccgccaaaacaaatcatcacaaattgggtggtttgagacaacagaaattgattctcttgcagttctggaggccagaagtcccaggtcaaggtcaggctcttggggatgatccctccttgcctcttccagcctctggtggctccaggcgtttcttggctcagggctgcaacactctaatctctgcctctgtctttacatgactttcatccccctgtgtgaactgccctgtgccttaatcgtatctgtgtcctctcctcttcacataaggataccagtcgtcagatttaggagccaccctaaatccaggatgacttcatctcaagatccttaactaattacatctgcaaagaccctatttccaaacaaggtcacattctgaggttcctgggagacatgagattcggggggacactcttcaacttactataggagtattgatgcctctgcctatagaggagaatcaatatataccatacaacccagcagtcctactcctgactattgaccctatgaaaatgaaaaccaggccaggtgcagtggctcatgcttataatcccagcactttgggagaccaaggcggggggtggatcacttaaggtcaggaattcgagaccagcctggccagcatggtgaaaccctatctctacctaaaaatacaaaaattagctgggcgtgatggtgcacacctgtaatcccagctactagggaggctgaggcacgagaatcacttgagcctgggaggcagaggttgcagtgagctgacatcgcgccactgcactccagcctgggtgagagagcgagactccgtctcaaaaaaaaaaaaaaaaaaaaaagatatgtataacttttattggtggttgccagtttcttccttgtatttgactgcatttttcgaattaaaaacatcttgttcctggctgggcatagtggctcacgcctgtaatcccagtactttgggaggctgaggcaggtgaatcacctgaggtcaggagttaaagaccagcctggccaacatggtgaaaccccggctctactaaaaatacaaaacttagctgggtgtgttggccagccccccataaacccagctactcaggagactgaggcaggagaatcacttgaacccaggaggtggaggttgcagtgagccaagatcatgccactacactccagcctgggtgacagaacaaaactccgtctcagaaaaaaataaaaataaaaacactggccgggcgcggtggctcatgcctgtaatcccagcactttgggaggccgagacgggcaggatcacgaggttaggagatcgagaccatcctggctaacatagtaaaaccccatctctactaaaaatacaaaaaagtagccgggcatggtggcaggtgcttgtagtcccagctactcgggaggctgaggccgaagaatggcgtgaacccgggaggtggatcttgcagtgagccgagattgcgccactgcactccagcctgggcgacagagtgagactctgtctcaaaaaaataaaaaataaaaataaaaaataaaaacatctagttcctgagaaactttttaaaaaagaaagaaaagcaaccaaccctagaggatatgctttatgccttctaacaggcatgtccatgaaggggccagattgaacagtttaggagtccaccacttatttctgtgtgctcaaactgggaatgaccatgatgctgaatttccctaaactcctatcttgccagccttcttggcaaagagttctatctggaagtttaagtagtttaatttaatagagagaaatattattcagtgactcggaaaagaatcaggcaagcctcccttcccgacaccatgaatacccacgttttttaatcggctccctcaaggtgacccaagatccaggggctcttttctacttgtgcttcttggccccccaaggacccccacaggcattctcactctactgccaatcactccaccaggggctcaacatccctctctggagccctagccaactctgtgtgtgccagcgtcctcgcttactgccggggatccaaggacaacatgcacagtgcccgcagatgatgctgagggcagccgccttactccaccccaccttcatctctgatcaaagcttttccaccatcaggtgctcctctgagagctttctcctcccctccccgctcccagctcaccccccacccccacccagtgccatctgcagtgccatctgcccccagtgccatctgcaggcttgtgggtgtgtgtcaatatttcacccagcttgtctgcagcggtgtgccactcttagcctcagaggagtcctcacatcgccagctcacacccctgagagcttgaccatgtcctcatgaactcaccgtccttcccaaaatcccataactaaaacagcctggaagtgtcaccaaggcccaaagacagccttctgaagattacttctcagtctcttagcctcccttttcctctcctctgcttcaagccctttatttatttgtttttgttgttgttttttgagacagggtctcactccgtcttccagactggagtgcagtggctctgtcacagctcactgcaatcttaacctcccagactcaaaaggtcctcctgcctcagcctcccaagtagctgggatcatagatgcttgccaccacacctgacgaatttttaaaatttttgtagagacagggtctcactatgttgccccggctggtctcgaactgctgcacgtaagcaatcctcctgcctctgcctcccaaagtcctgggattacaggcgtgagccactgcacctggccttagaaccctttaaaactcacacccagtacactggagggtaactgagctgtcactgaaaggacacaggacagtgtgaggaaaacagaagggcacagcaagccagtctcgcggagatctgcagaggtgttctctggagctccccttccaacccctcacccttctctatccctgctgcataggcttgtcgccacctcactggggacagaattttctcagacactctcaggcctgaaacctttgccttcagtttgctttacaactccctgctggctctggaaaaacaattttcccctctgcgccaaaggcctaatgatattgtccaccagaaagggttctccagagaagcactgaagtttacccagcagctaagacgatccggcctaaccctgatggatgagtttcctttactcagccttaatacccctgaaatcctgtggcaagtggagcgtttgatggggattaaataaaagcagtttacctcccactgtattaccaaatggggtttcaattccattctaagaccaaggtcagtacgggagtggatctggggtcatcactgccctagagccccggcaccagtaggcagttctctggggcccccacatggaaacctcagcagccctgagctatattcctggcctggcgtctctggaccacactgcaggcacgatgtggggttggattctttcttcacgacaccaattggccagtctcttgtatcacccctgctggccaaataatcatcttggaccccgaccattatggacctatattgagttccctccttgctgaatttggactactagagtactcttgtctgaagcacattttattttattttattttattttattttattttattttattttaagacaaagtttcactctgtcacccaggctggagtgcaatggcgcgatctcaggtcactgtaacctctgcctcccaggttcaagcgattctcctgcctcaacctccctagtagctggtactataggtgtgtgctgccacacctggctaatttttgtattttttgtagagacggggtttcgccatgttggccaggctggtctcaaactcctgacctcaagtgatccacgtgccttggcctcccaaagtgtttggattacaggtgtgagccactgcagctggcctgaaacatatcttttagtactttagtaatatatggattatatgtcatataatatcgattaaattgtgtattaaatctagtctccacaaaatcatagcccctttgagagtggaccttctcttacacatttttccaaggcacagtgttgaacacacagtaggtgcttaaccaatatttgccaattcattgaatggtgggcattcggcctcttcatctctagagtgctgtccttaagtacagtaattctatcttaagaacaaataacagttacccaactctgtcttctgcaaaacagaaaaaagaatagagaccaaaaatggttctgaggccaggtgcagtggctcacacccgtaatcctaacaacactttgggaggccatgacaggaggatcactttagccaggagtttgagacgcacctgggcaatgtagcaagaccctgtatctatttgcaaaaactatgattacttttgcaccaacctaatatttaaaaaaagactcactcctgtaatcccagcactttgggaggccaaggcaggcggatcacgaggtcaggagatcgagaccacggtgaaaccccgtctctactaaaaatacaaaaaattagctgggcgcggtggtgggcgcctgtagtcccagctactcgggaagctgaggcaggagaatggcaggaacccgggaggcggagcttgcagtgagccgagattgcgccactgcactccagcctgggtgacagagcgagactgcatctcaaaaaaaaaaaaaaaaagaaaagatagtggttttgaagagacccataaagagtatcttttttattcctatcttaatgaccatgtagaagacaagttgaaatactcttgggttggattgtatattcatatatatatatatattcataaatagtcatgtatatatttatgaaacagtcaccactgaattgtgtagctgggataatgttctcagtgagatgacccatagagatggttttcatcattggtggtagcctggacttttttttttttttttttttacagccattagtgcttttcaggctctctccaactgaatatgctgctattagataataatcaataaaccatgaactggccaggtgtggttaattccagccctttgagaggctgaggcagttggatcacttgaggtcagaagttcgagaccaggccaacatggtgaaaccccatctctactaaaaatacaaaaattagccaggtgtggtggcgcatgcctgtagtcccagctacttgggaggctcaggcaggagaatcacttgaacccaggaggcagaggttgcagtcacgccaatgcattccagcctgggtgacagagcaagactctgtctttaaaaaaaaaatagcgataataataataaaccatgaaccaacactagacccatatgcttaaagtattaactagcagccagtataccctccctccaccaaaccagtagccactttgccggtgcagagcatgagcgggacaacattgttaaaacatgaattctgcttccagtgttcctgctggctgaacctgtactttgttggcgtgtcttcctcaattgcttcctccagcgagctcccaaaagccaaaaaaaaaaaaaaaaaaaaaaagttatagtagagaggatcagtggtttggctaggcttctctgtctctttaatcgtatctgaagcataaaacaagatgactggtagacttttctcaaaatccctcctaatcagccacctctaccttgtatcctcagtagcttgtacagatggcaggaagataaaaatctacacagctactaggcttgcaccttccccaccacctgcccagcccttcaatttttagaggataatagattttcttttcttttcttttcttttttcttctgagatggagtcttgctgtgttgccctggctgtagtacaatggcgtgatcttggctcactgcaatctccacctcccgggttcaaacgattctcctgcctcactgagccttcccgagcagctgggactacaggcatacgccaccatgcccagctaatttctgtatttttgtagagacggggtttcatcatgttgaccaggctggtctggaactcctgacctcaggtgatccacctgccttggcctcccaaagtgctgggattacaggcatgagccaccttgcccaccttagattttattttctagagcagtttaggtttacagaaaaattgtgcagaaagtacagacatttttcatctaagcctggatcttaaaccatcaaagtttctgttgtagagaaaagagctgcagaattcatgattcccaaaattgtggatttatgaagagccaccctacatcgtgatcttggtggattttatctagagaaatcaccaaatctagaaacaaatctagaaatgaagcaagagcaattgcaaaatttagaaaaacacttctgttcaaagagaaatctaggctgataagacacattccatgcttatcagtgtacctgtccctactcaattatcaccacacagcacgtaatagttcatgaaatggatttaccttaatttatttggcaattctcccatagtaggatatttaaactgttttcttcctttttcaatcttatttttcttgacattataataatgttgcaataaaaatatttgtgcgtaagtcttttcctttaagattattttctttttctttctttcttttcttttttttttttttttcctcagggtttcactctgtcacccaggctggaatgcagtggcacactcacggctcattgcagcctccactgcctaggctcaagcagtcctcccacctcagcctcctgagtagctgagaccacagatccatgccaccacacccagctcatttttaaattatttgtggagacaaggtatcactatgttgtccaggctagtctcaaactcctgggcttaagccatcctcacaaagtgctgggattacgggtgtgagccactgtgccttgccaagattcttttctttctttctgttttgtttttttgtttgttttgttttgttttgttttttatttataccgagtcttgctctgtcatgcaatcttggctcagtgcaacctctgccttctggatttaagtgattctcctgcctcagctcttgagtagctggactacaggcacccgccaatatgcccagctgatttttgtattttttaatagagactgggttttgccatgttgcctaggctggtctcaaactcctgacctcaactgatccacctgtcttggccttccaaaagtgctgggattacaggtgtgagccaccatgcctggccaccaagattcttttcttaagataaattctcaaaatgtaagcttactaggtcaaagtatatcaagatttgtaagacacttgatacttattattcttaatactttacaaaaaagagaaaattactcccttttaattttggaatctataacatggtaattattcagatttgccttccccatgtagcatttctaggttcatatttaaaggaatttttcctactgagcagttattcactctctagtgtgtgtatggcgggggtggccacgggagtcaaccagattgacaccaaaatccactgcagatgatttgtgggtagaaagtagaagggaaagaggataaacacttttccttctccctgtctctgataaatagccaaagacaggaacattattacaggtgatataggaaaagtgcctccgtgacctcccacacccaggtcccatctcaggagacaaattcagcccaaggagcaaacgagaccatgaagttcacagcactccagtgtcaggtgcccccctgtaaagctttggcttgatgcaacaacaaaaggcattcgcatcctaacgtgacctcagcagatctcttcctccacctccaagagccgggagttgtaccagagctctggcagctgcacctgccaccaccggggagcccaaatgaatcattgctgtggctgagtgttttcctttggggcccggtgaagccactgcttgtttttaatggtgttggcttaattctggctcctgccctgaactgagtgtgacgataagaacatttcaccttgtccctgctctccaattacaccacatcaggaccgctgccacttcccactgctccgtggcagcccctctatgtaccacccaagttggctgactgtgggatgataggacagagaaggaacaagccaaggagcaagacagaggagactaacaggacgcagaggccactcttaacaccacaggctttttaactgaaaggaatgttaatggtcacctgggtcacttgatctcagtctccttagggccacagatctctgatgatcagatgaaagtggtcgaactctctttccagaaaaatacgccttctcaaatttcaggatgtctcccagaatccctgaaacccattcatctagactaagttgtggtttgtttgttgtttttttttttggttttggttttttttgagacaggatctcactctgttgcccaggatgaagtgtagtggcgtgatcttggctcactgcaacctctgcctctcggctcaagagattctcatgcctcagcctcctgagtagctgggacaacaggtgcacatcaccacgcccaactaatttttgtaatttttatagagacagggtcttgctatgttgcccaggctggtctcaaactcctgggcttaagccatccttgcactttgacctcccaaagtgctgggattacagggatgagccgctgttcccagttagactaagattttaatttacaaacaaggacatggaggcccaaagaacatgcaggaattagcccaaggttacacagaaaatttactgaatttacttatttatttgagacaaagtcttgccctgtcgcacaggctggagtgcagtggtgtatctcagctcactgcagcctccacctcctgggttcaagcaattctcctgcctcagcctccctagtagctgggattacaggcacatgccaccacacccagctaatttttgtatttttagtagagatggggtttcaccatgttggccaggctggtcttaaacttctgacctcaggtgatctgcccacctggcctctcaaagtactgggattacaggtgtgagccaccatgcccggccagataactgaatttaaactcagctctcctgattgccaatgtaggacccatcagcccatagtaggaggctgtcaccctgcactgagccctgtggcagcaattgtgggaaattagggtgcttacaaccaaggaaacaggatctcagactcatgaaaaaaaaaaaaaaaacctaagatcaatgagtaagcaatattcctgccatagagtcctctttggaaagtagatgctaatgccttctgttagttctccaggcacttattgagcacctatgaacatctcttaagctctaatcactgggagattcattatttattagaaattaaaactcgcctgtaatcccagcactttgggaggccaagatgggtggaccatctgagttctagaccaccctggccaatatggtggtaaaaccccatctctactaaaaatacaaaaattagccgggcgtggtgacaggcgcctgtaatcccagctactcagggggctgaggcaggagaatcgcttgaacccaggtggcagaggttgcagtgagccgagatcgtgccatcgcactccagcccgggggacaagagtgagacttcatctcaaaaagaaaagaaattaaaactcatcatctcaagcctgaagaggatgttgggttcctcaatgtgattttttgtgatttgttcagatggtgggtaccccaccctgaaatatttactacaaagttcaagtaaaggagcttcctcgtgcttgctattccatggactttggcatgagaattaggcacgctgttaatgaaggagaccagtggttggactaaaggatgccttggtggcttctactgcagccttagctattcaacagaggaacagaagactcccatgttgctgggaggttctcagtgacagtttctcaggacacacactttttaagtagcaggagactcagattctgaatttttctttctagaaagatgcaggtagcagttttgattgatgtttatcttagcggttggatgctaagaggcggttttgtttttgtttgtttgttttaatcatggaaggacctggtgaagcctacagacttgccctccagtctgagcttctctgctgactggccatgtgactttgagcaagcctctttacttctttcagccttggttttctcatctgaaaagcaggaataatattaatatgggcataatgttcttaaagcaacattaatagttcccttccctagttttacagcctattcttttctttttcttcttcttcttttttgttttttttttttttgagatggcgtctcactgtgtcgcccaggctggagtgcagtggcacaatctcggctcactgcaatctctgcctcccgagttcaagcgattctcatgcctcagtctcctgagtaccagggttcacaggcatgtgccaccacacccggctggggtttcaccatgtggaccaagctggtctcgaactcctgacctcaagccatccacccgccttggcctccctaagtgctgggattacaggtgtaagccactgcggccagctgacagcctattcttttctttcttttgcagcacatactccattctgccttgtatttttggtgatagctccccagtctgtctctcctactagatggtaacctctcaagggctatctttgtagtccctcaagcccagggcagcactttgtatgcaatgggtgtatcagtcagggcccaatcaggagatagaaaccatgcagtaatttgaataggagaaatgtaatagaaggaattattgatctctgatgggagcaactataaggatgtaaagggaactccaaaggataccctaaggctgagagagaatacccaggaaggacaaacttggcaggggcctctctgcatggctggggttcagacttcattggagaagcaggatggtggggaagttcacgaggttgacctgagccagggctggttcacagtggttgagcagcagagcgccctctggggtgcaggccagaggaggttggtggacaggggtgtgtgtggagagagagtcggggcacgctgccagtgcaaggcctgcagcacgcagtgcctgcagcaggagggccaccgtgaagtggttactgggcccaggctagggctgcaaggtcactgagcaactatgcactccaggcttgcagctggggcagagcatgaccgaaagtccccacaggcacactctgcagcccaacaacatccaaatctgaagaaatccccttcctcttgcagtggccctttagggccccctactgatgaggctcactgtaaaggagaaatgcttacagggtccagtccatgatctcagagcagaggcataagggcgactttggagctaaggcaatactatgaaaactgcaatgggtgcaatgagggatcaataaaatgtttgaattaaatcggagaaagctacataacctgtcatgcccccccttcatccgtgcttagttccctttctttgagtcctgtagattttgccaccaataaatgtcaaacctttttaactacttttgtaatttactctctggaagctcatttccctctggggtattctgtgtgtgtgtgtgtgtgtgtgtgtgtggtttttgttgttgttgttgtttttgagacagagtctcactctgtcgaccaggctggagtgcagtggcacgatctcggctcactgcaatgtccacctcccaggttcaagtgattctcctgcctcaggctcccaagtagctgggattacaggcacatgccaacatgcccagtagggacggggtttctccatctcatcatgttggccaggctggtcttgaactcccagcctcaagtaatccacctcccccaacccgcccgacatcagcctcccgaagtgctgggcttacaggtgtgagccactgtgcctggcctctgtgtgtcttcttaatgaggcatgtgtctctcttctcttagctcatacttaaaagagatttgcagaaagaaagaaggagcgggggggactggctctcgcaaacagtgtgagacccagtattttatttcacaacttatttctccacttgaacttgaacttgtttctccactgtctgtttcatttcgaggcagttcacttgtccctcccaaatgctttaggagtgtcctgaagcacttgacttcaagtagcagtggaaagaatcagagccaatccaagaaccaatctttctctgacttggagaagtcagtggccacctcgggtcagactagggagttaatctccttggacaaatctgaagagtccagtctccaaatatttagaaaagaataggcaagaagagaagaaccaccagccgacttggaggataattacaacacaaatattattcagaaagcatttagaaaggactaatcgtttcaagtaacttgagaatccaaccgagatgagttgagcctataaagagcccttcagatgccctcttgtgggagactgtgttaataggcaccaagtttgggttaggacagtgttcttgggtatcaaccaccctgttcttccaaaatattgcattctctcccgaagagtcagatgtaattagtgttaactgttgattccctccaggaatgagctaaacagtgggatgtggctacagttaagacttcctctaagaatgaagtggttgtccaaacttaaatctgttggccgggcatggtggctcacgcctgtaatcccagcactttgggaggccaaggcggatggatcacttgaggtcaggagttcaagaccagcctggccaccatggtgaaacccccatctctactaaaaatacaaaaattggccgggcttggtggtgggcacctgtagtcccagctactcaggaggctggggcagaagaatggcttgaacccaggaggcggagattgcagtgagctcagatcccaccacttcattccagccttgagactccgtctcaaaaaaagaaagctgtttatcatcctgcagaaggatgattatccctttagaccagaaaaatgacagtgagaagaactagaagaacttaatttttccactgaaatttagacttttttttttttttgagacagtctcactctgtcactcaggctggagtgcagtggcgcaatctcggctcactgcaacctctgcctcctgggttcaagtgattcttctgcctcagcctcccaagtagctgggattacaggtgtgcagcatcacgcccggctaatttttgtatttttggtagagacagggtttcaccatattggccaagctggtctcaaactcctgacctcaagtgatctgcccacctcggcctcccaaagcgctgcgattacaggcatgaaccactgagcccaggccgacatttatatctatatattgcggctgtgttgttgttgttgttattattattattattattattattattattattattattattttgcaagtgatgtgcattctgggccagtgaaacctagagcagattggcaggaaaccatctcagtgtcttaccaagctttaccttgttacctttatgtgtacaaaggaaattgtgcccttaaatgatcaagaaaaacaggtgtgtttcccctggataatgagattgtggtttattttcttatttttgcttatctatattttctgcaatgagcatgttttatttgtgaaactaaatatatataaaaatatatggccgggcgcggtggctcacgcctgtaatcccagcactttgggaggctgaggcgggcggatcacgaggtcaggagatcgagaccatcctggctaacacggtgaaaccccgtctctactaaaaatacaaaaaattagccgggcgtggtggtgggcgcctgtaatcccagctactcgggaggctgaggcaggagaatggcatgaacccaagaggcggagcttgcagtgagccgggatagcgccactgcagtccagcttgggcgaaagagtgagactccgtctcaaaaaccaaaaaaaaaaaaaaaaaaaaaaatatatatatatataaaatatatatttttaacatatatataattttaattttaaaaaacacacacttttctaactcttggcctatatccctgctttttgactcaaatttagccagaccctttccaacctctttactcctcctgttcaggtgaactgccaaaaatcagcagacttcagtttgggaagagattttttttttttggaagagattaatttcctcactcttgaactcctaaaaacagcccagtttttcttctacctctcaccaagcagtgattgatgctacacctgcctctgatgtgacaaaaccaaagccatgaatcaaagccttctatgattcttgcgcattctgaggctggtgaaagcactagccgggggccctgagacgtgtgaagatgctctgtgtgggggttattctgcctcgggcactttggagggtaacacctgctatcactaacctttgatatgttgctctgctttttcagattttcgacaatgaagccaaagacgtggagagagaagtttgctttattgatattgcctgcgatgaaattccagagcgctactacaaagaatctgaggtaagcaacagttgggatgagatgtggaagattcattcattcattcattccacaactatttcttaagtgcctcctaacttgggaggatgccatctctcgtcgtgtggattcaatttgctttcgtatcttgctggttctttttgcaagtctcaaaattaagtctctaactcttcagggaccatcattggccctggctgttactcaatctccacttagttttcctgtctcccaactctgccatcatttttggcaacgtcagtatccatagggctggaccatccaacacactggccttgctgaaaaacaacagtctccccaattacatgcgctcttttttttttttttttcttttttttttttgagatggagtctcgcccaggctggagtgtggtggtgtgatctcactgtggcatctgcctcccaggttcaagccattctcctgcctcagcctcctgagtatgtgggattacaggcgcccaccaccatacctggctaatttttgtatttttagtagagatggggtttcaccctgttggccaggctggtctccaacttctgatctcaaatgatcagcccaccttggcctcccaaagcactgggattacaggcatgagccacctgtgttttatttgtatctgaatcaatccttgaaaactttgatagctcattccagcacagctcctttctctcaaaacagcaagcaccttaatgaggacatctcctttgttcttggctgagaataaatttcagagaacttctttctgtctggttttcaacctaccaggatccatcctttgccttagttctaccttcttgttatacggtttgtgcaagtcaccatttatatcccattagtattttattaatggctgctgacggaacttgggtgacccacttgtaaataacatcccagccctgcaatgacagcagatgcagggctatttttgttggttagcgacatgccaccaatcccaatatgtttggaatcagggccccagactcgtccttgagccgtaacacgtggaccttgaaactcttctcccagagtcatcaaggctgatgggagacacaataaataaacttattcaaaatgaattctgtcgttacgcaaataaaccaggctcccgacgtggttcagatttcttttgcctccacattttggggttcatttcggtataaaagtcttacctgatcttagcaaatgctcggctgcttaattgcaggcgcttatgttcagctgctgtccctgaaagggctggggagaggctgatgtggatcactctgtgttgctcatctccacccaaagggtgagcgttttaacatcatcagctttcattatgctctgtggccaaccacacctatgcattttaagataaagaaagttaaacgctccctacgtaactgtggacccgccgaagagggaaataaacagggccactgaccttccccttgtctcactccacagaaatcctatagtttcatgtcaagtccgccagtgcttaatggggctctgatgatgcgcagagcattgtgcaaagcactcctgtgacgcctcgggcccccccgggctgctgtcctacctggacctcccggcctctttgggagctctgggccttccaggaaagcagggttgccagaaaactctgaactaatttcagcttttcctcccagtgtgctttggcgtggctctgcctggacttcagggagttccctcctgattcagtaggaagtcttgatacaaatatagaatattaatgaagaaatcaagtctcatttctagtcaacgtgcctgactcatttccctgtgctctgtgcccccaaagaacctccactagaaagcttcctttcattcacacagacattcgaggagcttttccttcatgcttcacagggtcactcatgggcacgtccgtacctccttccctgggtcctagagtattcttccctggatgcagcttggccaaggagatgagtggtaaagagtccagtaattattcatccaataaatatttatggagtcctcactgagtgtcacatacaatgttaagatggggatgtctgggcatggtgcctcacgcctgtaatcccagcactttgggaggccaaggcaggcggctcacttgagttcaggagttcgagaccagcctgatcaacatggcaaaaactctactaaaaatacaaaaattagccggcagggtggtcagctactcgggaggctgacgcatgagaatcgcttgaacctgggaagtggaggctgcaatgagctgagatcacaacagagtgagaaactgtctcaaaaaaaaacagcaatgagccaaagagatgcttagggtccctcccttcaggacacttccaatctaacaaataccacgcagagagtatttggcgaacagtagagaaatagtcacacagatacatatggagttcagagtcacacgtgcaggaaggcaggtacggggagagactgtgataaggaaactgaatttaagaggataggatcaggagacatgctatggaaaaaatgacatttcaggccgggcgcagtgcctcacgcctgtaatcccagcattttgggaggccgaggcaggcagatcacctgaggtcaggagtttgagaccagcctggccaacagaatgaaaccccaactctactaaaaatataaaaattgcccgggcatggtggcatgcgcctttagtcccggctactcagaagactgaggcaggagaatcacttgaagtcccagcgactcaggaggctgaggttgaacccaggaggcggtggttacagtgagccgagatggcaccactgcaatccagcctgggcaacagagactcggtctcaaaaaaaataataataaataataaatgaagctgaggtgtcataggatctaaattatgcttttaaaatattgttctggatggagaatggactggagaagaacagagtcaggagaccaccaaggtcactattgtgatttatattgtcggttacttaggttctgtcgtggcttgcgctagagggctggtggcagagatggacaggagcagatggtttggaggtatattttgaagatgagttgacagggattgctcatggattggatgtggggatgaggttgaaggaggaattgggatggccttaaggattctggcttgggcaactgatagatgggggtgctgcttactgaaatgggaaggtgagaagagaggtatacgttggagaaagatgagtggattttgtgatgtcagtgaggcatctaacacagacagaaatgagtctggagcttaggtgagagatctgggagaccaatttgagagtatttggcgaataggagatttaaaaatcctggggatggatgagaggaagaaagcatgaaatataaatgggaaaggggttcaagtctgagccttcaaggatggcagcatatggagatcaggttgaatctaaaagaatcaggagtctaaaagaattggccagaaagttaggaggaaaacacagaaatgcaccaaggaatgcaagtttcaagaggaggagagtgaccagaggtgctgaatgctgccaagagatcgagtaggaagagaatggaaaactgtccgctggagcagttctcaactgggggtgattattgcctcacgaggatgcttggcaatgcctatagacattcttggttgtcaaaacataggaggtgctactggtatctagagtgtagaggccagggatactgctaaaatcctctacagcacagaaagcccctcacaacaaagaattatctggctccagctgggcgcggtggctcacgcctataatcccagcactttgggaggccgaggcaggtgaatcacaaggtcaggagttcaagaccagcctggccaacatggtgaaacctcgtttcttctaaaaattcaaaaaattagccggccatggtggtaggtgcctgtaattccatctactcgtgaggctgaggcaggagaatcacttgaacccaggaggccgagattgcgctactgcactccagcccaggcgacagtgcgagactccgtttcaaaaaaaaaaaaaaaaaaaaaagcattatctggctccaaatgtccatagtgccaaggctgggaagccttgttctacaggaagaggtgattgaagatggatggaactctggattcagctttgacgctcagggccacccctggcccgccctggagtcttacggttactaaatggatgcgggagaaggggccccatagggctgagccctgcacattcatcatccattgtgtgacctcccaggggatctgctggcatctggaacaggtggaattcctcctccgtggacctggcagccggaccacaaagggctataggtaccactgggagcctgcaataaaatcttagaaaaagcattcccccaggggcgactccctcgtaaccccagccccatcaccttcaacaggccagaatacagactgcagtctgaacccacccaaaggaagaggggtgagtttcctgggctgttttggtggttgtgtctactgtaaacacaccagggactgggaataagaggaacaaccgattcagaaggcaaaccatttccaaacaaatgtctaactggcacactgtagataattaacaccctccaccccaccacaggagtttccttctaaaatgaaatctgaccttgttctttgcttgaaacccctcactggccctcctttagagttcagctcacacaggactccccctttctgagttttcctgggcatgcccccaccactgctggtctggaggcagcaaagttctggtccgtggcttctagatcatgctaggttatgctagctcatcactatggcatgagctctgcgaagacaagagctggctctttcccagccgctgccacagcaccagtgcttagcaggcgctcactcaatggttgctgaatgaatgagtgaaggcaagggactttgctttttttcttccagcagtgacaatttcagagcaaccgctatcaaagaaaatgaattcgttgccattaagcaagcagttgtgaatcagagttcctttttttttttaatcggaggcatccagctccatgggccttttcttcccatccatctttgtaagttgacgatgtcagcgtcctaaatagaaacgctctttatgtgaggaagccggatgctgatgggccgaatctgttcctggatttttttgatgctgatgaacccagaccagggttatctgggttgctcctctccactcagctactgttgcacacacacacggccatccaggccaaaggaggggatgaaagcactttcctttctttttccatttctccctggaaacctttgagccacacaatcaagactgcctctctcatgaaggtgaccagagcttggagttttccactgggtgccctctgcccgatggccctcgtgccatcgccactaaccggggactcagaagcatgctttggggattcaggaccagctgatagcccagctctgtgctttccttattctcatttttgctgtgttgctgtttcctgttagggcctgaacttcagctctcaaaaacctcttagcttcaagtttgttctcatagtcattaatggactctgcagggcagtgccgtattgtggggtgggggtgggggaggaattagtgtgatttttttcaggcagagagagcccctccattagtcacacagaccactgagaccctgcccgcccataagagtcataaagctgtttgcaccatgtcacatgtaaaatgaccatcatcaacaccaaagcaggaaaaggggtgaagccaaaagctgagcaggttggactggttatgtggctgatacatagtgtcttgccgctgccaagattttcatcccagctccttgatgctctgccaagatttcaaggtgaagatcccagcggaggaatgaggaactctgcacgataagttggagcatgcctgcagaggccacaggcagtgcggccatacccgcaaggctgagttggcagttttggggtgcaagaacaaacctcaacttctagcctgcaggactagcccaggctggagaatctgaaagccatgctgggagagatctaacccagaggcctttgatattggcttctagtcaagttcaagtccagtactttctcctccattcactgcagtagttcctgaggtctggcttccatcatgagatggggagtgaccaaagaaaatggcatctatactggcctcctgggggctgccacctgcagcaatctcccctagacacaaatgtgtagggcgcgtgcagcttctcaatcttcagacatacctccagggcaaaggaagggaaagaaaaaggaatgtctttcctagtcaaggaagtagaagtagagggttttgtgtgtgtgtgcttccttttttaaatcttcattgattcatgtaatgaaaagcaaaggagtctctagcccagaggttctcaactacaggcaaatttgtccctcagggccatctggcaatatctggagacatttttgattgatgaaagtggatacggcatgttatgaatccagtcggtagaggtcagggaggctactgaacatccaaaatgggccaggtgcagtggctcacacctgtaatcccagcactttgggggaggctgaggcgggaggatcacttgaggccaggatttcaagaacagccggagccacacagcaagaccctatttctacaaaaaaaaaataaaaataaaaataaattctctgggcatagtagcatgtgcctatagtcctagctactcaggaagctgagatgagaggatcacttgagcccagacgtttgaggctgcagtgagccatgatcatgccactgcactccagcctgggaaacagagcgagaccctgtctctaaaaaagaaaagaaaagaatccaaactgcaccacaacagagaattatccagctccaaaatgtcaagtatgccaagatcaataaaccctgacatggaccaatccaaggaaagaaaacttagtaaaacctactggtatcaagactcattaatgaattcctttagttagcatttactaagcacctactgagtgccagctccacactaagcattgagggtacaaaaacaagattatgtcagccctcaaaggtcctgtcttctactgccttttgaattgatcatcttgttacagatgaagcaatttctcatcccctttattttggaggatataaaggccatcttactagtgataaatacagcatagtaagttgaataggggaaatttgcaattgtttgtactcagatagcaacaaaggagaaagaataacatgaggctgtcctagaagcatgggcccctgacgtggcataattaaatgtttttcagacagaatttgattttgaactttccccttaagttgggtgactaagtctccaggtccctgggtcatagccttcctggaccaagaactccttggcagccagttcattggtccccacagatctaaatatctgttgaattctctgttaagggagagagaacagaacaaaaggagatacatctagcttttccaataactgtcaagggtgagagattaaatgttgtttgctaaggaccggccctcagaaagggaacagagagatcaactaagtaaatattgtcatatttagctgtacccttcggtacaaagagcttcatccaaatcactcggctccctcaaatgaaaaatattttcattctggtctacatcttggcctttgagggtggtaaagattttccgttacctctaatggccagatttaacacagctgcctcatgccggggtacatcgttaagttcacttggttgtgctgttattatctttttttttttcccgtttccctcaagtccatctgtttctttctgagagtaacgcagctgttttgcagtgggttccaacttactggggcctgcatgcttcttggaaaataagaggacttgatgacatcactgggatggggagaagtccctgctgccaaaggggtccctggtgggagcctctaaaactggagggagagggaggaagcctgcaaaggagacacaagagaagggtcctcagcagctgccgcatcgcgggccctgagccctctccccttccagggtctggatgatgccagtgctgttagaaattgagagagaaggccaggcacagtggtccacacctgtaatcccagcactttgggaggccgaggcaggcggatcacttgaggtcaggagttcgagaccagcctggccaacatggtgaaactccatctctactaaaaatacaaaaattagccacgtatggtggcgggcacctgtaatcccagctactcaggaggctgaggcaggagaatcacttgaacccaggaggcgaagcttgcagtgagccaaagatggtgccactgtactccagcctgggtgacagagcgagactctgttgaaaaagaaaaaaaaaaaaaaaaaaaagaggccgggcacagtggctcacacctgtaatcctagcactttgggaggccgaggcaggcagattgcctgagctcaggagttcgagaccagccaggacaacatggtgaaaacccatctctactaaaatacaaaaaattagccgggtgtggtggcacatgcctgtaaccccagctactccggaggctgaggcaggagaatcgtttgaacccggaaggcaaaggttgcagtgagctgagatcacaccattgcagtccaggctgggtgacagggccagaccctgtctcaaaaaaaaaagaaacccatgatctggttgggaggatatggtataatgacacaaatgctaagtgacagtacggagcaaggcagcaagagaaatacattcacacagtcatgtgtgatctactttcctcaaacttgtacacatagtcatcctcagaggattcccaggactagtcagggaagactttacagcagagatggaatctgagctgggccttaaaaacataataggtttatgtttattttttgctcataaattaatacatgatccttgtaaaaaaaattccgacatgatacaaacacaaaacagagcaaatctcctatgatccctcatcacagacatcgctgttaaagttggtgtttatacttaaacataatgcataaatagtattattttataaaactaaactcacactatgcacaccatctcgcaacatgcattatttcactaaccacataagcttgccatttttctgtgcagcacacgcctgtctagtgagttttaggtggccggataatatgccagtgaaggccaggttcagtggctcacgcctgtaatcccagcactttgggaggccaaggcaggcagatcgcttaaggtcagaagttccagacccacctaggcaacatggcaaaaccccatctctataaaaaatacaaaaattagccgggtgtgatggcacatgcctggagtaccagctactctggagactgagggaagaggatcacttgagcccaggagtcggaggctgctgcagtgagctgagatcccgggcagcagagcaagaccctacctcaaaataataataataataataataataataataataataataagcgagtgtacggtggtgccatgtgtacatcattctccatttgatggacatttagggtgtttccattcttattatggtactgcaagaaacagccatagatatattttgagagttgttctaacgtctctgtagaataaatctaaaagtgaaagtgttgagtcaatggacatatgggttgagattttcctagatataacaaaattgcccacaccctgcggctacattaaattgcccctgactcacacttggatgggagcaaactcaggtctgaagatgtgtgagatggaatggacagtgtagtgaatggctgaaaatgaggagtctcagtgcatggtcaagggtcagtgaggcacaagggaaaaacattgagtaccaagtcaatgaatttggactttattctgcaggtcgcagagagtcttcaaagcaggggtcaccaaaaataaaaaattccgttggccaagaaaaaagaaaaagcaggggttatcagcaaccgtgcaaggggactctacctgtgacctcaccagaggggctgactgtcttgtggggatggtgagggcaagctcctgggtgcccagaggtttaggacccttcaaatccatcaacctacatccttccctcttctgctaccccctttcatgaacaaattgccctcagccatcttgacaacaataagattttattaatgaataggaacatttggaaataaaaaggtgttaaacagtagtccagttctcaacaaccctggctgcaccattttcagaccaataattggcatggcaactcacttcccaaggaacaatgaggtgttctttttcagacctcattccttccaaacccgggaaagataagacgccaagtctcgctgaagcaccgtgcctagtgctgattttaaaagccactgctgttctcttggcctaataatgcgaagctacctcagcatttggatcaaaccccatttttactgggattactacaaaaaatgatagtgcccaacttcatcctagagaaagagttttcatttttttttttaatttttcaaggggaaaaaaaccatttaaactgctgcagtaattggcatgaatgatgttccccagaactcagtgttcagagcagcagttgcaaatcctaccaattgaatttggtagtgaaatgccagaccaagtaggtcaaacaaaatcaaggcatatgaattcctaaatgccagatcaaaagcagagaatctaagtctctgccaggagtgcagttgctgattgtggcattgtgggtcattgaatcaatagaaagagcccttgggggccaggtgcagtggctcacgcctgtaatcccagcactttgggacgccaaggcaggcagatcacttgaggtcaggagttcgagaccatggcaaaaccctgtctactaaaaatacgaaaattagctgggcatggcggcacgcacctgtagtcctaggtactagggaggctgaggcacgagaattgcttgaatccgggaggcggaggtggcagtgagctgagatcgcgccactgcactccagcctggacaacagagtgagactttgtctcaaaaaagaaagaaagaaagaacccttggggaaatcaccctatcaccctatatcccaaaaggaacagaccagggagggaagaattcatccaagcaaaacattcatggaagggagaaacagttgggcttttcatagagggatctgtgcaaaagataacccctagaacctatgaattgggattcccaacttgtgtgctctgtgtctagatgattcagccctaatgtggtgagggccctggctctgggagcctcccaggcggtcacagccactgcatttgatcatcatcaattctgtgtctgagtccctccctcccttccaaagaatggacagatggacagatgggatggagaagtgagatgacgtcaaaggcaaggcatggaaagtgaccagcacagtccctggcacacagtaagcatttcataagtgttcccttctctctgctttgaccctggcttcgagctctgcagatgggttgcaggaatggtggctccgtggaaaccatgtgtctttggaaagtggccaccgtgagtggcgtcacaggagtttgtttgcgtgtcgcttttcccttgtcggtgtgagtggagaacaggagcagaggtgtgataccaatagctccagctctcaggatcatgggatcctccgccggctcagcaagatcctgcagaagttacagccatttgtgctgctgagacttttcaaaaaaaatgtgttattgcctctgttatggtttaacctgaattccggatggcacgtgtctctgctacttcacctcgaagaaaccttagaagttacatttgctgtttgttttgtgccaagtctgggccatctgtggcactgcagtgccgggatggtacccaaggcagtattgccatgctatctctgtctgccacgagccttcttacagctgtactatagaaaactaacatttaagactttcaaagaaggaagcaagagctgaagggcccaaggctctcagccaggagtgaacagatacaacaagctcttcttcagttccatctcatggagaacttccctctgtaatttttttttttttttttttttttttttgagacagagtctcactctgtcacccaggctggagggcagtgtcacaatttcagctcactgcaacctctgcctcctgggttcaagcgattctcctgcctcagcctcctgagtagctgggactacaggtgcacgccaccacgcccagctaatttttgtatttttagtagagacagggtttcaccacgttggtcaggctgctctcgaactcctgacttcaggtgatccactcgccaaagtgctgggattacaggcgtgagccaatgcacctggccctgctctgttctttcaagaaaacaggcaatgagtccacacaagttgctcataactggggccagccacatcagcccctgctgtttttagtcttattaaagtaaaacaccagaacttcttggcccttagaacagagttcccaaatcaggtcagcatcacccagggaggttttgaaaactggagatatccgggtcccaccttagaccaacccaaccagactcaactggtctgggacccaagaatcagtgtgtaaatgcaccaggtttgggaaaatggcctcagagcagagcttcccatcttttttcatgccttgacaggtaggaagtgtttcgttttggccaggcgcggtggctcatgcctgtaatcccagcactttgggaggccgaggcaggcggatcacctgaggtcgggagtttgagaccagcctgaccaacacggagaaaccgcatctctactaaaaatacaaaaatcagccaggcatggtggcgggcacctataatcccagctactcgggagcctgaggcaggagaatcacttgaaccctgaaggcggaggttgcggtgagccaagatcgcgccattgcattccagcctgggcaacaagagcgaaactccatctcagaaaaaaaaaaaaaaaaaaagagaaagtgatttgttttgattgacacattgaggaggagctcctggttaagatgaccaacccctgagctcagaaggcccagtctgttactcaagggctgcgggagcaatatgccttatcacatctactatccattcaccatagggaagctttgcctaagagagctcaacttactgaggtcaaggttttaaaccactttattgttacttaatttgggggaggagggatgcaggggggttagcaatgtaagcctgtaagcctgcccattccccgattgtgagagaggtcagtgcctttgaattttgttctgtctgttgggaatctgacgccatctgtagaatcagatccaaagtcttccttgacagctactagcgttaattataacataagtttgtgcagtttttttcctaagttgcttctgatttgggggtggcttcagattgacattattgaagtttatttcctccacccaaagactctaggccggctgtgattgttcacgcctgtaatcccagcactttgggaggccaaggcgggtggatcacttgaggccaagagttcgagaccagcctggccaacctggcaaaagcctgtctctactaaaaatacaaaaattagacaggcgtggtggcgggtgcctgtagtcccagctactctggaagctgaggcaggagaatcacttgaacctgggaggtggatgttgcagtgagccgagatcgtaccatttgtactccagcctgggcaacaagtgagactctgtctgaaaacaaagacaaaacaaaaaaaagactctggtagctgtccaccaggtcctctggctaaatcttctccaagccctttctttgtttagcactctaagaatctgcaacaatgactatgatgtttgaggtggcatttttctccttgagaaataagacctgacagagcgattgtctgctccacatctagttattcagactccaaatacaactgttcagcttctgttccaaaaatacccaagaaagaataagtgttattaaggtgcttgtcttcatcttttattattaagaggcccagagaaagacttataattactagctcattagcttgggccttagaattttcaacgaaaatttctcacaaaattgctaaacctggttttagaaggtatggaactaacttttgagaaaaataaattccaccatttagagtctcactgtcgcccaagctggagtgcagtgatgcaaccacggctcaccgcaacctccacccctccaggctcaagcgatcctcctaccacagcctcctgactaccagcacatgccaccacaccagctatttgtgtgtgtgggtgtgtgtgtgtgggtgtgtcgtgatggggatcttgcagtgttgcctaggctggtctcaaactcatgggctcaagtggtccacctgcctcagcctcccaaagtgctgggattacaagtacgagccaccactgcacccagccaacattgtctccattttatagataaggaaactgaggcttagagagtctaagtaactggctggaagtttcaggaagcctggattcaaaccccaaagtgtcctaccccaaagattatgcttcccctacaccaagtaagattccttcaggtaaagctagacgtacaaacaactgttgtctttggaaatcactctaagaaatagttcccttcttaaatatatcttcccaaccccgagtctcagtgactaaatgatcttagggaaagactggtatgtagaaaaagaagggcctttgagacggttggttacctgatgtgatagaattccactcctcatctttggggagaagtttcctctttacaaacattccagaacatagtggattggccaaaagcagcttgggtctgtaaaaaaaaccaaaaactaaaaactagccatcctccattagagaatagaaaccttttattattttttttcttttacacaaggtctcactttgttgcccaggctggagtgcagtggcaccatcacgacccactgctgtcttgacctcctgggtttaagccattctcctgccttggccccctaagtagctgggactacaggtgcacaccatcacacccagctaattttgggtttttttttttttttttttttttttttttgtagagacggggtttcaccatgttaggtttcccaggctggtctcgagctcctcagctctaaccatctgcccgcctcagcctcccaaagatgacaggtgtgagccaccacacccagcccaggaagctatttttaaaaagaaaaaaaaaagccattagtcaccaaagaacccatctacagaccctaattcagaaatattccttttctcactttagcatccacacgatagtcttagagttaaataacttgcccaggttcacacagtagttactggagctgaaattcaaacctgggggcagggcatgtgttctctcacttcaaagcctcctcagttcatctctcagttctgctccacagatctgaggaccccacaaggtgctcccgggcatggtaaacagtgaaatacattgtatcaaacagtgaagggagaaacagcctgaagaatccactcatcacttttacctgctttatatactgggattccaaaagtgcatttggagaaacaaaatgagttctgaagctcaaataagtttgaaatctaaaagtggaaatattttattgtcttcaaattacagactgattggcttattgaacatctctaccctggtttctgttcgacaagttggaggcctaaatttcccaaaataatacagtacacaaggagcaagctagacttagggacagttaatctggtgctgatcactgttggcatgctgcaactcatcgagatatttgtcagcctattatcagcttttgatttaataaacttaagctatctctaggccaaattgtagatcctcggtaggaatgcaggctgttaatgcctccccatagccttcgtctaaagagcactgctaaaatcagagtggagaacagcctcaagttcaaaggctgcaaaccgagccaggttctaataagctccctttatgggaggagctgggttcttggcctctcactgtctcatgtattaaggtggggtcctctccagtgtgcccttgaatgaccttattgcttttgattagaggttaccttgaactatactcatattgccaaacggaacaggttagtgttctgcaacaggatgttagggagacagctcttgttgctctggaactgggaaccaggcccaaagctggggacaaagaggaattgggactccacattcaccaggcagctgctaatcaccagtggcccagatgaccctcttcccacagctctggttgcccctatcttccccttccctaggccctatgtggagatgaaggaggggagtttgtagtcattgggagtatacttcttgcctcaccccaatcccatgtgacaggagtagtattctgagagaatcaactacagtagctggggcatctgcaaaaaaaagctggctataggcccagtgcagtggctctaatcccagcactttgggaggccaaggcgggaggatcacttgaggccaggagtttgagaccagcccagacaatatagcaacagcccatctacaaaatatttttaaaaattagctgggcccagtggcacatgcctgtggtcttagctactcaggaagctgaggtgggaggattgcttgagcctaagagttcaaggctgcagtgagccatgattgcaccactgcactccagcctgggtgacagagtgagaccctgacacacacacaaaaaatagttgactgtttgctgagccgggaacttgcaggcccaccctcaatgctgccatcctgcaagacttgggtgatactaataagtgtccccaaaagcttgcagaggaacgtagagattgcacctgctgcccatctggaaatttctaaaggagtttttgaaggagcccatggctagggctgagatggaaccatgggagtgtgagcttgggaatagcacgggggcatccccttgggcattattgaaaatgcaggtaatagtgggctacttttagtagcttgcttatgagaattctggggtgttttctgtgtctccaaccagttcaattctccagcaccagctatgtgtccaacaattcaattcaattagacactgtctatctggagttagcatcagatcccagtcccacaaagctgccccacttctcactgacaggctataggccgggcacagtggctcattcctacaatcccagcactttgggaggccaaggcaggtggatcacttgaggccaggagttcgagactagcctggccaacagagtgagactccatctctattttttttactaaaaaaaattttttttttaatctggggtctccacgactccttcctcaggctcaataatttgctagaaaggctcacagaactcaggaaaacatttacttagatttaccagtttattatcaaggatatgactcagcagcaggtaaatgggagagaggcatcaggtgaggtattggggggtggggacttggggcttccgtgccccctctgggtgtgccatcctcccagcaggtcagtgtgtttaagcgtttatggagctcaatcccagcaccccctccctccctagaggtcagtggatggggctgaaagttctaaccccctaatcacctggtgtttctggtgaccagagccatcttgaggccatctagggcccctcacctgtgtatgtgatctgaaggagcttgttatgcatcccaaaagtcacccccatcactcaggaaattccaggagtttttggagcattgtcttaggaagcagtgacaaaaaccaaatctattttgtattacatcacaaggatgaaatgagaaagcgaatctgaagtgcctgacacagactctggtacggagcaagcacttgaaaacgttagctcctagggtgatttttcccagcttccttccttgactttcctctggccacctctcttgcaagttctcatttgctttcatcttctccccagttcctaaaaggcatcctgggggctagaaaccataggctttttttttttttttttttttttttgagatggaaccttgctctgtctcccaggctggagtgcagtggtgcgatctcagctcactgcaacctctgcctctcgggtttaagcgattctcctgcctcagcctcctgagtagctgggactacaggcatgcgccaccatgcctggctaaattttttggatttttagtagagacggggtttcaccatgttggtcaggctgatctccaactcctgacctcaaaagatccgccctccttggcctcccaaagtgttgggattacaggtgtgagccacggcgcctggccaaaaccatggactattacattgttttgtgtgatgtgctcaaatttctcatttgcctcgtccctcttcttaaagcaatgagtttcaagtgtttgtggcactgaactataactgagaagggtacaaaacagaaacattccccttgccacagctgcctttcagtgcctttctacacatcagatgcaccttatgagtcaaactcctttaagagagtcattttgcagagaaaaaacacaaaccgctcagggtttgcggtgcattctagtgccaagagcaaatgctttaaaaatagcactttaggtattaactgctaacaaagcaagaattgactgcttctggcatgatttgcatttagggttttggtttgtttttttttaagttgatgcatagcagttgaccttttaagtcaagttttaggtcagttctccagcacattctgaaagctccttagttttgtctcttttttaaaaaacagctttattggctgggcacaatagctcaccactgtaatcccagcacttttggaggccaaggcgggtggatcacctgaggtcaggagcttgagaccagcctggccaacatggcgaaaccccatctctactaaaaatacaaaaatcagccgggtgtgctggcacgtgcttgtaatcccagctacttgggaggctgagacaggagaattgctggaacttgggacgtggtggttgcagtgagccgagattgcaccattgctctctagcccaggtgacagaatgagactccgtctaaaaaaaaaacccaaaaaaacagctttattgagatatagatcacataccatacaattcagccattttgaatgtatagttcagtggattttactataatcacatgtttacctcaccacaatcaaatgtaaaacattttcatcaccccacaaagaaacctcatatgttttagctatcatctccctaccctctcccctcacccatctcccaagcctcagcaaccacactgatctactttctgtctccatagatttcccttttctgggcatttcatatgaatagggtcacttaataagtggtctttggggactagctgctttgaaagctccttggttttatgtgtatccctcttaagattcaagttcaaggaatcctacattaattcagggctaaactttactttcattggaggggaatgagaatgagatctgcaacaccttggagtcttcaggagaagttccaggatggagagaaaaaaatctgacatgtgatatgtgttgttcatccatccctattttagggctgagggttatagttacataatgtagcaattcctggctggagttcctgcttagccttttttcatttagcatttatcaaaaacttctcatttcaattaacagggcaagcccctgttggctattgccctttgtggttcaaattgagagtgtaattaatcatggagacttcatatctcagtgaacgtcagctaataagattgcctccaagatgcaagctcagccccagctggaccaagctctcctgtgggcttctccttgcaccttccaggtgggagactgattctatccaaaacgaggacgcagttttacacgggctgctcaaacaagccctttgctctgccttgtcccagtgcgagatggatgaggcctgcaggtgtggctgatcctatagagtggacgccttctaaagatgtgccgaagtccatctggccccagggaaacagccctggcaccagctcaaccccctcgatacagatgggctttaactacaagggtccaatttgccatctgccaagcctggagagaatcggtagcatccggagccagagatctcattgtggatgaatttataaaaccctggctagaagaacttgcagccccacgcgttccccaccagccagctgccgggccgagaggagctgggcagggcccttgaggcaagagcatcgcttgcagagaagttccacatcccccagcggagccagatgccactactggggttcggtgctccgtgaccacatgagtgagctggaagagtgaccgcggaacctagaagacttgccttgtaaaaacctctctgactcatgttatgggtttgtgtccccccagaaagctaggttgacgtcctaacccccagaatgtgaacttacttgggatagggtctttacaaaggtaatcaagttgaagtgagatcattagggggaccctaatccagtatgatgggtgtccttataaaaaggagaaatttggagctgagtgcagtggctcacgcctatggtcccagcactttgggaggtcaacgcaggcggatctcttgaggtcaggagttcaagaccagccaggccaacatggtgaaaccccatctctactaaaaatacaaaaattagccaggagtggtggtgggcgcctgtagtcccagctactcgggaggctgaggcaggagcattgcttgaacccaggaggtggaggttggatggcaccactgcactccagcctgggtgacacagcaagactctgtctaaaagaaaaaaaaggttggggggaatttggacacacagacagacaagcacagagggaagacgatatgaagatgcagtgagaatgtgatgacttcactccagtgatgcttctacatgccaaggaacgcccaggggaaaggcatgaaacagattcctcctcacagcccttggaaggaccagtcctgatgacacctcgatttggggcttctagcctccagtactgtgaaacaataaatttctgatgtttaagccaccagtgtgtgattatctttttgttgttgttgttgttgtctgtgatacttgatacagcaggaaacgaatagactagtggaaccaaccctccaccctaaataggtacgaatgaaaaacacatatcacatgttagatttctttctctgcattacggaacttttcctgaagcctccaaggtgttgcagatctcattttcattcctctcccaatgaatgaccatttcaaccaggtaaaatttagccctgagttaatgtaggatttcttgaacttgaaccagggaggaagagagccctgccctggcttggaagattactggaaggaaaggacagcgtatgcctctgtatgcctttcagcccttcacaaggagagcttgtaagtcacctttaagatgcgtgaaggctgccggactttgaggctcacccatcctgccattgggaggtggctgcccagtacatgcaccgttcaaggagggccccctgcttggctgggaccacgaggttccagaggcccccaggtgaaatcgcctaagggagcggcccatgacagggacaatctgctctgctctctgctttcgtccacttggaacagagtgttcctgcctctgaaacataagagaaagggggaaagacattggtactgagcactgaagactgtcggttcacctggacccagaacccagtcataacatcccacagaacaagaacccttctctcgcaattcctccaaccaccatacttacggacactggcatgtgacagcttccagaaaatggaaatgcccacccaggctttcactcacacaaggaaacctgcatgctgttgggcagtcatattttttatttgagatgatcagcatttttctgtacatttgactacaggataacaataaactcatagtaatcctacagcccctgggacattcccactgcctttctttggaggagcttaataagatttgaacaaagtgcactacagcatctctcagggcatccttgtatcatgtgcttatcactttgggatgtctcctgtgcatcacgcaccttctatgtgccaggctgggctggggactttgcctaccttatccaatttaagtcttgcaacaacccgcaaggaagttttttgattttttttgagatggaatctccctctattgcccaggctggagtgcagtggtgcaatcttggctcactgcaacctccacctcctgggttcaagtgattctcctgcctcggtctcccgagtagctgggacaacaggagcgcgccaccacgcccaactagtttttttgtatttttagtagagacggggtttcaccatattggccaggctggtctcaaactcctgacctcgtgatctgcccgcctcatcctcccaaagtgctgggattacaggcatgagccaccacgcctggccaggagttcttaacaccattctacagatggggagatggaagctctcctctgatcaattgtgccagaatttcagacagaatgtcctgtccacatggtgtaggggtgacgtgttaaaccatttgggctgcaataacagaataccatagactgggtagcttataaacaataaacattgattttttacaattccagaggctggcaaatccaagatcaaagcattgacagattcagtgcctggagatggctcgtttcttggttcatagatggcgcccctctcactgtgtcctcacatggcagaaagggtgaaggagctatccagagtttcttttataagagcactaattgggccgggctcgctggctcatgcctgtaatcccagcactttgggaggccaagatgagcggatcacgaggtcaggagatcaagaccatcctggctaacacggtgaaaccccatctctactaaaaacacaaaaaaaattagccaggcgtggtggcaggcgcctgtggtcccagctactcgggaggctgaggcagaagaatggcatgaacctgggaggcgaggcttgtagtgagctgaggtcgcaccactgcactccagcctggacaacagagagagactcatctcaaaaaaaaaaaaaaaaaaaaaaaagcactaattgcctcccaaaggtccccaccccctaataccatcacactggtgattaagtttcaacatatgggttgggttcggtggttcacacctataatcccagccctttgagaggccaaggcaggaagtgtgcttgaggccagaaatttgtgaccaacatgggcaacataatgagacctcatttccacaaaacattaaaagaattttttaattagctgggcatggtggtgcatgcctgtaatcccagctaggtgagaggatcacttgagcccaggagctcaaggctgcagtgagctgtgatggcaccactgcactccagcctgggagataagagcaagaccctgttgcaaaaaaacccaaaaagtttcaacatgtgaattgggggaggggcaacaaacgttcagaccaaacgttcatgggagcccgggtcggggtggactgtggctgagttgctgattacttctcagcttcaggttcctcatcaagagcatggagataatatgtgtacttcatagcagtgactggatcttgactgtacattcaggtcaccacctgttcagaccccacccaggaccagttaggtcagagcatgggggtctaaccttgctcttctgtctggacctcatcccgaggtttcagtcacagttctggaggccggaagtctgaaatccaagtgagagatttcgaggctctaggggaccatccttcctttcatcttccagcggctccaaaatttccttggtttgtgactccttaactcccatctctgcctctgtcctcgcacaaccttctcctctgtgtcttctcctcttctgtatcttataaggacacttgtcattggatttagggccctcccacttaatccagcatgatctcatctcaagacccttaacttaattacatctgcaaggacctttcccaaataagatcacgttcatagatagatactaggggttaagacctggacatatttttggggaggatttatttaacccacagcagacatcttgcactctgttttctgattgcactgagttgggacccagcaggggtttcaagacacgtaatctcggtcacactaaagtccagccttatgacgttttataattggccagaccttgaaacttgcctgtggaaaggcccaggggatttttaacatcggggatgaaggttgaggtttataaacctctttttaaaataaggaaacctggaaatggaggattaaaatgtaaaataattctgttcttttataaagaataagtgctataacaagagtttgaatcaggcccaaaacactacagacattctagaaatacaaaacagaaatatatacatatttggaaatgttgtaagagaggtcaaccgatgtgtgaagggggcaatttagatactgaatgttcgtaaacccaagtgagaaaatgagaaagaaaatgacttcataaagaatgggtcttgggaggtgttaaggaggacagtgaggaggagggggtagaatgtgaaaagagaagtttgcagcaactggactatttcagataagaccagataatttggttcccttcccctccccacccccgttttttttgttttgttttgttttgttttgttttgtttttggctcatcttcattcaaaagcatttacctggatgttcatttctaatcttgagttttgattaaaggagtcctttcccttacctccctctagctctttgaaagtgaatccttaattataggccatgtttgagattgactagatgaaatcaacagctgtagatatgacaccagactgcaaaatatcgacacaatgttgccataaaaagcccaattgttaattgcttatttggcactgggctataacaaaaacaccctttttctgtttaatattaaaagtaaatgtagtggaaagaacatcgagctagaagtagggtaggctgggattctagtcccagccctattgccgagtgcctgtgatttgggggcaaagcattttatttttctcaggccccggtgtccttatctataaaactgagggcatgaaaccaaattaccactttcagcttaaaaattatattcttaatcatgaaaatacagcatacttctcatttctatcctttttccaaaactttatttcacaatacccaaatataattctatacttttgtcacgcaatcaggaaccacacattgatttaagcatctacatcgtttttgctgtgcaagcaatacttttccagtcttattctgaactgaagtgagctgtcagtcccgacaattctcaactgctttggaaatgcaatccactggtgttccatttttaataccgtgaagtcttgttttattcttgaagaatatgaatctgaaatgtacatgaagatgctggaatagataccatctcaaactcagctgtcattgactgaagaaacaagccaagggcagtccatgaatcagggagggagggcaaggtcgggcacagccaactggtccaggttcctcttgctcagtcagacccactgtgcaggacctgaagggcaggaaggcagctcagactatggccctggtgacagtgacaggagggcagccaaatgcctaggcagataggggtgggaccccagtgaaaccccacttccaagccaaagacagtttaaagcctgaaagccaagctacaggttaaatcctcagaccagattgagaactggcctttcctctgattgatccccacccttcacctattttaaatatgcctactctttcctaattggttatctacactgtcgtgcccacttttgagtggtatcttcactttaaccttttttgcatactcacaaaccaatcagcatgcgctccctattgttagcccataaaagccccaggctcagccatattaggggactttcccactttgggataggtaaccaccccacccccagtatcctctctttgctgagagcttgcctttcgcataataaattatactccactcactctctggtgtctgcatgcctaattcttcctggttgtgagacaagaactcggacctagctgagctaaggagcagaaaaaatcctgcatcactggtttttattttatttccctgcctctggtgcctgcccaccttgctttgtttgctgggttgtctcctacatctctgggttaccaggagcttggactcctgctttcctctacttgccgtctttgtcctatcctttacttactcagttgcttacccaagcaggaagacctccacttaggttctcgagggtttgcctgtccatattctggtcaactgcaggggggaagccatgtcttctaagcctcaagatagttgtttacgtgcaactatcagaggtaaacacccatcatttacctctgttgggaggaagtcaaaagacagatggggaaagaaaccaaatttccctgtttaactccacctcctgtattttaactcatgagagcttcttgagaggtataaatttccttgttttcagctttcaggcttgtggctgattgtgtgaacttttggtgtgctctgggaaagaacaaagcagcattcattctcttcatctttggtaatccagttaatgcacctgttttataatatgcttgatggatgtgttttgttacctgttgctgagcaacagccccaaaatttagtggcttaaaacaatgagagtgcattgtttctcacaattctgcactcttgactgggtttagctggccagatctgctcttcatgatgtgagcttggattgaaatatctcagatggccctttcactcaacgtggtctcagctgagatggctggagcatctgagacctggttgagcatgttgccacatggtctcaccacatggctagcttgggcctcctcatatcatggtgctctaaggtaatcagcctagtcttcttacattgtggagggttccggtttctggcttccagcttctcttgaaaggctaaactgacacaatgtctcttctggtacattctgttggtcaaaacaaataacagaccagtctagattcaaggggtggggaaatggtgaggggaacagcatgtcagcacagtgggggaaggaattgatggtggccatctttggagatgtatggtagataatctctcaatttattggtcttctcttttctttttatttttttccaaattcaacattatttcttattttattttttaaacatacaaaaagctgtacacagctttttaattaacacatacagcttgatgattttggacataagtatacacctgtgaaaccatcaccacaatctatgccataaatctttttttgttttttgttttttttagagacagagtcttgctctgtcacccaggatgcagtgcagtggcgcaatctcaggtcactgcaacctcctccccccagggttcaagcgattcttgtgcctcagcctcccaagtagctgggactgcaggcacacaccaccacacccaactaattttttgtatttatagtagagacagggttttgccatgtggcccaggctggtcttaaactcctgagctcaggcagtccacctgcctagacctcgcaaaagtgctaggattacaggcatgaggcactggctgctatgccataaatctatccatcacctccaaaagtttcctcctgccctgttttattattttattattatctttttactctcaatggcatgatatggtataggaacacagagcaggcaggaactagtcccatggcctcaagcagcaaatttcccagcaattccggggtgctatggaaaagcatgttgtctctgccctggactataggattggatacattacttaaatgctcctttgactgccttgggaaatgcaataatggctaacatcaattgagcacttgctacgggccaggccctatattagtctttttcatgtatcatatatattttattttattttattttatttatttatttatttatttgtttatttatttatttttgagatggagtctcactcactttgtcacccaggctggagtgcagtggcatgatctcagctcacggcagcctctgcctcttggattcaagcgattctcctgcctcagcctcccaagtagctgggattacaggcacatgccaccacacctggctaatttttgtagttttagtagagatggagtttcaacatgttggccaggctggtctcgaactcctggcctcaagcaatccactcaccttggcctcccaaagtgctaggattacaggcatgagccaccatgcccagcctcatgaatcacattctcttttttttttttttgagatggagtctcgctcggtcacccaggctggagtgcagtgatgcgatcttggcttgctgcaacatccacctcccaggttcaagcaattctcttccctcagcctaccaagtagctgggactacaggcgcccgccaccacgcccagctaattttttttttttttttttgtatttttagtagagatggggttttactatgttggccaggctggtctcaaactcctggcctcccaaagtgctgggattacaggtgtgagccaccacgcccagtcgaatcacattcttaaattagcatagtctttccaggcctatgcatatgatttcggtggtggtttccgggttggtttaggcaatggaaacacaacctggcaaaattaatagagaagattcagaaatgtcacccacagtcaaggtcacgagcccctcccttcagactcacttactcccttcagatacttattattcattctcttttccttcccccttcccagaatctcttttgtcaatattgttctactccattagcaaaacagactttatatcctattaatcaaatatttgtcccacttgagtccctttctcccctcacccccaggcccactgtcttcctgcaacagagaccaagaaggaaggaccctgaaggaagctcagggaaccctgatcttcagtgtagggttgcgtctgttctgagtggagggaagtgctctgtgaccacacatgcccctcctacacccccagggcaaagaaatgtggtcaaggtggaaggcagtgcagtacctggttctcatggagcacactcaagaaacgtgctcaggatcatgactctgataatatgactttaggctgggtgcagtggctcacgcctgtaatcccagcactttgggaggccgaggcaagcggatcacgaggtcaggagttcgagaccagcctggccaacatggtgaaaccccatctctactaaaaatacaaaaattagccagtgtggtggcacgcacctgtcatccagttacttgggaggctgaggcggaagaatcgcttgaacccgggaggtggaggttgcagtgagccaagatcacgccactgcactccagcctaggcaacaaagtgcgactccatctcataataataataataatagtaatatgactttaggtaggaccatcagcaaacccagagccagtacatgccctgaaaaacccaccgacgcaacatagcatttttcagattgtattttttaaatgtttataatatgtcatttacataccataaagctcacccattgaaagcgtacaacttggccgggtgcggtagcgtatgcctgtaatcacagaactctgggaagccgaggcaggtgtatcacctgaggtcgggagttcaagaacagcctggccaacatggtgaaatctcatctctactaaaaatacaaaaattagccaggtgtggtggtgcgtgcctgtaatcccagctacttgggaggctgaggcagaagaattgcttgaacccaggaggcggaggttgcagtgagctgagattgtgccactgcactctaaacagagtgaaactccatctcaaaaaaaagaagaaagtggtgtataattcaacgtttttttcatatacttatctagttgtgagccatcattttaatctaattttagaacattttaatcaccccaaaaggaaattttgtttctgtttgccgtcattctgcataccactcccttcccccagctttaggcaaccactaatctgcttactttctccatagatttgcctcctctggacatttcatatccatggaattatacagtgtggcctttggtggttggcttcttctacttagtagcatgttttctgaagctcatctgtgttggtgcatgtatcagtacttcatttcttcttttttttaaatttcaacttttagatacagggggtacatgtgcagaatagttatatgggaatattgtgtaatgctgaggtttggagtatggatcctgtcaccctgtggtgagcatagtaccccatggacatgatttcattcttttttatggctgtgtagtattccatgggcacctagattgatttcatgtctttgcttttgtgaatagcacagtgatgaacatatgagtgcatgtctttttggtagaatgatttcttttctttgggcatatacccaataatggggttgctgggttgaatggtagctctgtttcatatgtttgttggccacctgtatgtctttgagaagacttcatttcttcttatggcacagtaatatttcattgtatggatataacacatgttgtgtatctgatacaggcaagcccctaaatgggtgcttagcccaggaggttcttggcttcacccaggaaagaattcaagggtgagccggtggtgttaaaagttgaagcagtaggccgggcgcggtggctcctgcctgtaatcccagcactttgggaggccgaggcgggtggatcacgaggtcaggagatcgagaccatcctggctaacacagtgaaacccccgtctctcctaaagatacaaaaaattagccgggcatggtggcaggtgcctgtaatcccagctactcggaaggctaaggcaggagaatggcgggaacctgggaggcggagcttacagtgagccgagatcgccactacactccagcctgggcaacacagcgagactccatctcaaaaaaaaaggacaaaaaaaaaaaagttgaagcagtagcagcagaggtgctgctccttgcagagcttgactgccccctaagcagtgtgcccagaataacagcacagaggcagtgctccactcattttatagtcacttttaattatatgcaaattaaggggtggtttatgcagaaatttctaggatgcgggtggtaacttccacgttgtcaggtcattgccatggaaaggggcagtaacttcacagtgttgccacagtgatggtaaatgacatggccgcttcttatggaaacctgcttccgccctagacctgttttagctagccctcaatttggtccagtgaccgagcgagcttctagaatcaagtcttcatttctcagtgtttgttttgttttgttttttgtttttttgttttgagatggagtcttgctctgtcgcccatgctggagtgcagtggcgtgatcttggctcactgcaacctccacctcctggattcaagcagttctcctttcccagccttcccgagtacctgggactacaggcagatgccaccacgcccagctaaatttttgcatttttagtagagacggggtttcaccatattggtcaggctggtctcgaactcctgacctcaggtgatccacccacctcggcttcccaaagtgctgggattacaggcgtgagccactgcacctggcctcatttcttcctatggcataataatatttcactgtatggatataccacctattctgtatccattcatcagtaatgcagttgctgggtagctctgttttaagttctttgagaagtctccagactgctttccacagtgtggactaatttaccctcccacctacagtgtatcagcattccgttttctccacggcctcaccagcatctattgttttttgactttttaatgatagccattctggctggtgtgagatggtatctaattgtggttttgatttgcatttctctgatgattagtaatgctaagcattttttcatgtttctcggcgacctgtatatcttcttttaagaagacttcatggtcaggcatggtggcttacgcctgtaatgccagcacttcgggaggtcgaggcgggcagatcacttgaggtcaggagttcgagaccagcctggccaacatggtgaaaccccatctctactaaaaatacaaaaaattagctgggcgtggtggcgcatgcctgtagtcccagctactcgggagtctgaggcaaaagaattgcttgaacccagaaggcggagattgcagtgagccgagatcatgccactgtactccagcctgggcgacagagcgagactccatctcaaaaaaaaaaaaaaaagaagaagaagactttgtttctttgtatgccagaataatatttcattgtgtggatataccatatattgtgtatccatcaatcagttcatggaaatgtgtattgtttcccttttttgtggctattatgaattagaacatccatgtacatgttttgttttttggggttttgtttgtttgtttgtttgtttgttgagacagggtctcactctgtcactgaggctagagtgcagtggcatgtttacagcttaatgcagcctcaatttcctgggctcgagtgatcctcccaccttagcctctcaagtagctgcgactataagcatgtgccaccacacctggctaatttttgtattttttgtagagaaggggttttgccatgttgcccaggctggtcttaaactcctggactcaagtgatccacctgcctcagcctcccaaagtgctagggttacaggcgtgagccactgcacccagcccatgtacatgtttttgtgtggatatgtgttttcaagtctctcgggcagatatctaggagtgaaattgctaggttaaatggtaaccctatgtttaatcttttgatgagctactgaaatgttttcaaagtggccacactatttatatttctgtcacaatgtatgagggttccagtttctccctatctttgccaatgcttgttattgtgaacatagaatttaactagtctttcacttaggtatttaccaaattttggctaagattctgatgtcccagccacatgtgtgtgatacgtcgaatagggttgaagcattcactcaacaagcatgtattcaacatctgtgatgtacccacctgccagacccatgacaggggaagcttcagaagcagaaaggaggagccctcattctgagccacccaggaaagggtccttggaggggatgacactgaagtactttttttttttttttttgagacagagtctctgtcacccaggctggagtgcagtggcacaatctcggctcactgcaacctccgtttcctggattcaagcgcttctcttgcctcagcctccctagtagctgggattacaggcatgcatcaccatgcccagctcatttttttatatttttagtagagacgggcttttaccatgttgcccaggctggtctcaaactcctaacctcaaatgatccacccaccttgtcctcccaaagtgctgggattacaggcctgagccaccgtgcctggccaagtgtttttttgttttgttttgttttgtttttaatacagctgggatcttgctatgttggccaggctggccttgaacttctggcctcaagcaatcctcctgccttggcctcacaaagtattgggattaaaggcgtgagccactgtgcccggcccctaagttaagtcttgaagcaaggaaaggagaatcaggcagagtgcaggacttggtgggggagaaggaacttcaggaagggggaccagtgcctacctaggaggttccagactcctggggctttggagaatgaggccagcagaagcttcttaaggctcacgagagaggtgtggctttgggaggctggtccggaaaagatgccagaaaaataagtaataacatcaaaggccttgtacctccttcctgccagggcatattacttttatgctacactcatggtgccatggacagattttgaggaggggagtttacatctgggaggccaccgtggcagcagagtggggaatggtggatggagagattgagaagaggcaggagggcaagcattcacccgctactttgatgaaggcctggcgtcagctggcatggaagttggccctgggagtgcactgtgttttttaggggagctacagttgtggaagtggtcaccatagcaaaaaggtcctaacagaggaggcagatctgtaagggaagtcaagggcagcctgaaagccctctttagaggccagtgccagatggccttggcggagccacggccagatctgagagaataaacctgtctttatttgtaagcagcctgcttttacctcccaagcccacccctgagacacagtctggtctgcattaaaagggctggggctgtcccagccaatttgattttgtgtctcatcctatctacttctcaacacaggaccccttgactgccaggtttctcctgggaggggagatgccaattttctgcttcagcctgtagactccgctgtgtgctgtgaggttctttcccttcctggggtccaacatccccgtgaacaggaccaggactagccccaaacccacagctggacagcagatcctggagcagctgcacgtcttctttatgataatgaaaactggctgggcccggtgacccacgcctttaataccagcactctgggaggccgaggtgggcagatcacttaagcctaggagcttgagactagcctgggcaacatggcaataccccatctctacaaaaaatacaaaaattagccaggcatggtagtgtgcacctgtagtcccagctacttgggaggctgaggcaggaggattacttgagcctgggaggtcaaggccgcagtgagccatgatcctttctcaaaaaaaaaaaaaaaaaagtactgaaaattagctcatacatacatatttaagcataattactgggttttatatagtttacatgttctaaggtatctctgaaaaaaataatcttctaatgaaataatcagcaaatgattggctaatggcaatcattagacaaatattggatgattaaacttaaaaaaaaaaaaaaacccttgctgggcacagtggttcatgcttgtactttgggaggcctagcactttgggaggccaaggtgggtggatcactcgcgttcaggagttcgagaccagcctggccaacatggcaaaacccggtctctattaaaaatacaaaaattagctgggcatggtggcgggtgcctgtgatcccagctacttaggaggttgaggcaggagaattgcttgaactcaggaggcagaggttggggtgagccaagatcaaaccactgcactccagcctgggtgacagagcaagactccatctcaaaaacaacaacaacaaaaaaacccttttacctgtttttttcattcttgtaattgaagtataatacaaatcttaagtgtaaaactcagtgaatgtgtacacgttacatccaggtcaacatataatcatcccagaagtttccttcatgtccctttgcaccaagcccccacccccaaagagattactgctcatctaacttttatcaccatacataaagttttgcttgttcttgaacttcaatttgaatcatacaatgtatatgctattgcatttggctacttttgcttaacatagcatcagtgagagttgtacacgtttttgcatgtatcagccatttgttctttttcattgctgtgtagtattccattgtgcacctagaccacaatttatctgtctagtttcttgcttatgaacatttggactgtttccagtttttgcctcctgtatttaaagctgtcgtgaggccaggtatggtggctcacacctgtaatcccagtactttgggaggccaagaagggaggatcacttgaggtgagaagttggagaccagcctgggcaacatagtgagacccatctctacaaaagaagaaaagaaaaaattgaggccaggcacggtggctcacacctgtaatcccagcactttgggaggccgaggcgggcagatcacgaggtcaggagatcgagaccatcctggctaacacagtgaaaccccgtctctactaaaaacaaaaaaattagccaggcgtggtggcgggcacctgtagtcccagctactcgggaggctaagacaggagaatggcgtgaacccgggaggtggagcttgcagtgagccgagatcgcaccactgcactccagcctgggcgacagagcgagactccatctcaaaaaaaagaaagaaagaaaaaaagagaaaagaaaaaattgagacacaatataattcacccttttaaataaatgtgcaattcagtggtttttcgcatatgcacaaggttgtgcaactgtcaccactgtctaataccagaatgttttcatcactccaagaggaaatgttatatccattcataatcactctacatcccttcctttcctcaatccatgtcaactactaatctactttctgtctctatgtttgtttgtttgtttttgagatggagtttcgctcttgttacctaggctagagtgcaatggcgcaatcttggctcaccacaacctctgcctctcgggttcaagcaattctcctgccttagcctcccgagtagctgggatgataggcagtaggtgggattaccaccatgcccagctaatttttgtatttttagtagagatggggtttctccatgttggtcaggctggtcttgaactcccgacctcaggtgatccgcccgcctcagcctcccaaagtgctgggattacaggcgtgagccaccacacccagccctatttctatgttatttaatacttattcctgacatttaataatgatggtcaaacttttaatatatcaatttctttgatttttttttttctaggatcctaagcacttcaagtcagagaagacaggacggggacagttgagggaaggctggagagatagtcatcagcctatcatgtgctcctacaagctggtgactgtgaagtttgaggtctgggggcttcagaccagagtggaacaatttgtacacaaggtaagtggtccaacagcagttcctgggctgtggacaaggtaactgtctatattgccaaattggagtccatgatacacaacaggtgcacaaatacatcaggtcactgcatctcaaaaacactttttgggccggttggggtggccaacacctgtaatcctagcactttgggaggccgaggcgggtagatcacttgaggccaagagttcaagaccggcctggccaacatggtgaaaccctgtctctactaaaaatacaaaaacattagctgggcatggtggtgggtgcctgtaacccagctactcaggaggctgaggcaggagaattacttgaacccgggaggcagagattgcagtgaaccaagatcgtattattgcactccagcctgggcaataagagagaaactctgtctcaaaaaataagaaataaaaataaaaaataaaaaaataaaaaatactttttggatgaaaatgcattttatgcataggttcaattttcttccactaatagatgttttatgccccatctctcattctgtgacctccatgtctattaggcaagcgtatttgggaaacacacttctcagtttggtattggactcatctactcccagacagagaaacttgggaaacagccaaagggcttatctgtgagcacagcccctaaggttaattgccacccaaaagatctacaaatgtaagcacctaagcagaagatgcccagaggtagaacaagaaatcccaatagtcccattagacagtataccccagcatttctgcttctttaataattctgttactaaagtagccaggtgtggtggctcatgcctgtaataccagccctttgggaggctgaggcaggtggatcacttgaggtcaggagttcgagaccagcctggccaacctggtgaaaccctgtctctgctaaaaatacaaaaaaattagccgggtgtggtggcacgtgcctataatcccagctactcaggaggctgaggcagggagaattgcttgaacccaggaggcagaggttgcagtgagccaagatcgtgctgctgcactccagcctgggtgacagagcaagactccatctcaaaaaaaaaaaaaaaaaaaggaaataataagaataattctgttaccaaataattgttaacagcctcgggatgcagatttcaattgtaaacctactttggctaaacatgttcattttggttttttgttgttgttgctgctgctgttgttttgagacggagtctcactctgtcgccaggctggagtacagtggcacaatctcagctcactgcaacctctgcctcccgggttcaagtgattatcctgcctcagcctcccgagtagctgggactactgggaggtgcgcacgccaccatgcccagctaatttttgtatttttagtagagatggagtttcaccatgttggcagggatggtctcgatctcttgacctcctgatctatctgcctcggcctcccaaagtgctgggattacagacatgacccaccgtgcccggccggcatgttcattttgtagcagaatcccacttggtgaagagtcatattttctcagggtttctaacatgactctgtccctcatgggagaaaaaaatgggaaatgcaatgttgagcattgccctttgtagctgctctcattttcataagaataaatactacccaaattgtctctacattccagataggctggttatctgtttatttttccacttaaaaactgataagagtagcttgccaaaattattttggagtcactggaatttaaccttaatgcactgagctttttgttacttagatggatttgtctattgagattgggggccagttaacaataaaaagtttaattctggaatttaggtccaagaactagactgccagtctcttgaaccctcataactcaggctcacggtaatggcagactctggcacaaacatgagagccctgggtgttttcttgaacagagaagcatgccactcctttcccgtgctccagaacccagccagccagccaggagccagaatgaaatgtgatacgtagaaatcaagctccaggatctcctgttttcctcctgtgtcctgattattgcacaggaaagcaattgcagctcccaaagtaaatgttttccagcctcagctttgtgtctatctaaggcagtgtcttccttggtttcccacagcatccctttttgtgtgtggctttttaaggtaaaaagacttcctcttactagggccactatcatagtattattttgttttgttttgtttttttgagatggagtctcaatctgttgcccaggctggagtgcagtgacatgatctcggctcactgcaacctccacctcccaggttcaagcaattcttgtgcctgagcctcctgagtagctgaggcacaggtgcatgccaccacaccaggctaacttttgtattattagtagagacggggtttcaccatgttagccaggccagtctcgaactcctaaccttaagtgatttgcctgcctcggcctcccaaagtactgggtttacagtcgtgagccaccatgcccggcttcatagtgtgttttccactcacaaagcatatttaataaggcagagttgtcagttaaaaagagaataatacaaaataaaaataaggctgggcgtggttcacacctgtaatcccagcactttgagaggccgaggcaggcagatcacttgaggtcaggagtagttcgagaccagcctggccaacatggtgaactctcatctctactaaaaatacaaaaattagctgggcgtggtgacaggtgactgtagtcccagctactccagaggccgaggcaggagaatcacttgaacccaggaagtagaggttgcagtgagcctaggtcgcgccactgcactacagcctgggggacagagcaagactctgtctccaaaataataataataataataataataataatttaaaaggccatatttatattgccccagggtccactgtgtttcttttctcacagatgactcaggctagttttgagaatctgtttcctgaaaatacctgtaagatttatgccttgccctttccaaatataaggaagtgttattgacactccagaaacgcacctgctctcgcacgtgagtcgctaatgagtatctgaggctagcatttgcatgggttgaaggtgccagggatgcctttctctgaacacctttgtttttttaagaatctattcacagttaaggggaaaaaaatgttcgaaagcgagccatgagcacattattgaattctggtttccagccgacagctgtgttgtgcttcgtgtaatagggtacatttactgatgcctcgatgctgttcttttgatttccatgaatttgagacactcagcactcaagtgtgtatagctgtgtgttgtttcttgtattcattatgtgtttcctactttcaagtcataaaagcctcactagatatccagaggcctggagtcataaacacttcattataaatgctttccttgtttctgcaaattcactgaattaaaatccttcatttattgaaacatgcttgaaccttccacgagaggtttttcacaatcactggatttgtttggcaggaagaaaggaatgttacagggatactgtgagtatccaagaaatgtaaaaagacatatttacccaggatggaaaagaataccatgaaataaaaacacatgaacagtatctcacacacgcagacacacacacacacacaaatggtatatactattttccttagccttctattgccattatgtgtcaccataagaaacaatttcatcctttttgtgtccagtcaagcttgtcattcccattacgttctattctagttcaggtctcttttttcatcctttcaatggtaaacggcctttttccccctcttctattacatgaaagtcaaacctaaaaggatatttacttatcttgtatctcacacattcatttatgcttgtttaaaaattgaggccaggcgtggtggctcatgcctgtaatcccagcactttgggaggccgaggcaggcagatcacaagatcaggggttcgagaccagcctgaccaacatggtgaaaccccgtctctactaaaaaaatacaaaaattagccgggcatggtgacaggcacctgtaatcccagctactcaggaggctgaggcaggagaatcacttgaaccagggaagcggaggttacagtgagccgagatcgcagtgagccgagatggcgccactgcactccagcctaggggacagagcgagactccgtctcaaaaaaaaaaaaaaaaaaaaaaagataaaaagaaaaattgaatcaatatttattttttaaataattttttgtgggtacatagtaggtgtaaacatttagggggtacatgagatgttttcataaggcctgcaatgtgaaataggcacaatgtgaggaatggggtatccatcccctccagcatttatcctttgtgttacaaagaatccaattacactcttaagttattttaaaatgtacaattaaaaaattgaatcaggctgggtgaagtggctcacacctgtaatcccagcactttgggaggccaagacaggtgaactgctcgaggccgggagtttgagaccagcctggacaacatggcgaaaccctgtctgtactaaaaatacaaaaattagccaggcatggtggtgcgcacctgtagtcccagctactgaggaggctaaggcacaagaatcgcttaaacacaagaggcagaggttatagtgagttgagattgcaccactgcacttcagcctgggggacagagcaagactgtctcaaaaaaaaaaaaaaatcagtatttaggatatgtcatcagaaaagagggaatgttaagtgctgttcactttttaggatatgtcatcagaaaagagggaatgttaagtgctgttcactttttaggatatgtcatcagaaaagagggaatgttaagtgctgttcactttttaggatatgtcatcagaaaagagggaatgttaagtgctgtttgcttagaagtgacttgctgtcggccaggtgcggtggctcacatctgtgatcccggcagtttgggaggtcgaggtgggtggatgacgaggtcaagagatcgagaccatcctggcaaacatggtgaaaccccatctctattaaaaatacaaaaattagccgggcatggtggcccacgcctgtagtcccagctacttgtgaggctgaggcaggagaattgcttgaaccctggaggcagaggttgctgtgagccaagatcgcgccactgcactccagcttggcgacagagtaagactctgtctcaaaaaaaaaaaaaaaaaagtgacttgctgcctagaaaagtgttctagatttccaaaatttatgacctcctggcaccagtgagacacaccctcccacagatgaaaagtagatgctgttttagttaaaaataaatggagagaaaaacttcaaggtaattaacctagatatttatttgtatcactgctgtgtgactgtcaagtatttgtcattagtttgtacacacacccagccctactctcaaataagacaaagagatgaatatactgcaagtgtgtgtacaccatggggaagggctggaggtgtgtgagcactataggacctataggcagcctgtaattgtcatcacctatggacagagggattaagaactctgtaatcaccaagatccccagaattgttaacaacttgtcttccagatagttttcatcaaagatgctattatttcagtctccttcttttactttttaggtggtccgagacattctgctgattggacatagacaggcttttgcatgggttgatgagtggtatggtaagtcaatttctccaaaataacttgtagaacaacttcatgttgtctcgggctttctgtccatttggcttcaactgctacctagaaggacaacaacaaaggcaaggccgctgcttcctgtgttggaaatagcactgtctgccaagcataatgaagatgtaattatagaagcttggtctaaaataaccacagaattattgactaagtaggaacctcaggatgtttgatgcttacatagttgatacgcatggctccatcattctctgttagatgggtttcaaacccatcctaatttatcccaaacttcaagatcaaagctgtctgaagcatcctgtcaagtaaaagcagtcctttgattcagacaacatttgaaaccaccccttgccgggcgcagtggctcacgcctgtaatcccagcactttgggaggccgaggcgggcagatcacgaggtcaggagatcgagaccatcctggctaacacggtgaaaccccgtctctactaaataatacaaaaaattagccgggcatggtggcaggcacctgtagtcccagctactcaggaggctgaggcaggagaatggcatgaacctgggaggcggagtttgcagtgagccgagatcgcaccactgcactccagcctgggggacagagcgagactccgtctcggaaaaaaaaaaaaaagaaagaaagaaactacccctcaacaaatatatacaggttctgcaagaatttaagggcagacagaggcataggtgccccgttcatcctaattgaaactattgttctggcttttttttcatgatctgggaagagttaaacaatttctacacatttgcagcaaatgaaaacaaggttagcttcatcccatgatggatggaccatccttcccaggtcctcagcagtcttgttttgtccacatgaattttctgcactcccagaatcagtcatcagatggctaccgtccttggctataaatagaaaggaacacgccccaccggtgacttaggttagatctgattttcaggtcgattgtctaatgaaatgcccttctccttggccttttccaaagtcacattaaatttgttctgagtataacctagattgcattttggtccttttctgtcattgtttcaccaactccctcccttttctgagcagaaggtaccaaagtaaaaggacacgttagacggaaggggcaaagacagtcattattattaatattgttagctatttctgagccacatttaaaaggcatggttctataagctatgggcttttcttttttttttctttttttcttacctccttttgcagttttcccagatctgcaccttctgaagagcaaatgcaccttcctgggtttgtccaaatgcagatcatttatgctctcttatcacacacccacagaatgccgctctcataccgcaaaagcactggcttgccacattgtcatgtagtctcccagagacctgtctatttctagttgtgttttgtgaggcaggcaggagagtctcctgtgattacttcctctgatccttaaataaatctttctggttgtttttttctggggcgcttttctccgattctcagagggagcacagaccccaagaaaggataagaacttctggtctctcccagcttgtgctcctcagagctcatggtttccttgctaccaacaccaaggaaatatcaaaaggatatttaaagaatcataggtgcaaactgattagaagtttggcaaaaagagaggtacctgaagggccaaaaatctgccactttgaaaaccaacacacagggcacttggataggtttctctctgttgccagagtgccaaagaagatttttcagctaaaagaatagccgggctctgatcaagaggacagaataataaaaagggtttgattagaggcaggatataggaagaaaacccagtgtgggtgggtatctagtaaatgaaaggccaggaaggcgatggggcctgacttttccatctcagctgagcctagggcaaggaagagacttagggacttctttttttttttttgagacagagtctcgcactgtcgtacggactggagtgcaatggcacaatctcggctcactgcaacctccgcctcccaggttcaagcgattctccttgcctcagcctcccaagtagctgggattacaggctcccaccaccacgccctgctaattttttttgtctttttagtagagatggggttttactatgctggccaggttggtctcaaactcctgacctcgtgatccgcccacctcagcctcccaaagtgctgggattacaggcatgagccactgcgcccggccttagggacttctaataaaagacttagggacttctaataaaaattgaaagaaaaaaaaaaactgccaggcacggtagttcacacctgtaatcccagcactttgggaagcctaggatggaggatcacttgagcccaggaattcgagaccagcatgggcgacatagcaagacatcatctctacaaaataaataaataaaattagccaggcacagtggtgcatgtccgtagtcttagctattcaggagaccgaggtgaaaggatcacttgagcccaggagctggaggctgcagtgagctatgatcgcagcactgcactctagcctgggtgaccgaacaagacctcgtctctttaaaaaaaaaaaaagaattctgggattacaacaggagcccaaggctagaataatgtatcaaaggaaacaggagatctccccgaatctggagaccttcaaaagagagcacttatttacttaggatgagtgaagtggaggcatttaacaactaaggagtctattgtgcaaaaaaccttttccttatctgagcacaaaacaacactgtgggctttagtgaatgtggatcattaggacaccttgcactccccagagtgggtctccccctgcatacactgacatagccccagccaaaacaagcagccttttcactcagcagtggtctgagaactacaccgttaatttcatgtaagcttctgcaaccatcagtacccacagctgagctgctgaccaggaaaacagtggctccttcatcacacagatgcagacactcagtgaatcaaatgaatggaaatgactcctgtccacagagtgccttctcagtcccatattcaaagtaattctgggaactgtgggccatatgtgccactggtacccaggctaagcgcccaccagcattacccttccactccattttggggtacctgaagtggcctatttttatttgttctggacaggctcagtgagactctcatggaaacatggaaacatggaaacatggaaaagatccaaaataaatccttgcctatagctatagcgtctagcactggttctcaaagtaaggtccctggacctgcaacgtcagcatccctagggtacttgttagaaatgcatattctcaggccccaccccaaacctactgactcagaaactctgagggtctagcccagcaattgttttaacaagccctccagatggttctgttgctggctaaagtttaagaactactggcttatagcatgggctataaaccagactgggacattgggttgtaaggaccgtttaattgattcaatccaaataggttaactagagaatcatagctgtctgcagggccaaccacactccagcctgggcgatagagcgagcctttgtctctaaaaaacaaaaaataaaatcaattttaaaatgattgcaggaacccaaattcttacaactctgatttcttgtgagaattagaaaaaaaagcttccctttagacagatgaattagaaaaaggtgccccttctgggcagactcagcaggtgctctgggcttagggctgaatttgagccccatttgcctcctctgctgtgtgttcatacagtgcacaaactgtacacactgatgcatgggtagctctagatgtctttctctctaattagacacaccacctccagtgcttaattaagagtcaagaaaaaaggacattgttgagggtagtgatcatttgtcagccaaggatgaattttgtatctcttctgagtttcagcatttggctgtcacgaaactgtttccctaaagagattttattctgttcgtgttcattgtaaagtgtaaccatttccatattggaggagttgagtgtgtctttcaaagccgtgattggtctttatccatgagccttgggtctctctgcacgactagaacgctaatcagagaaataacaacaacgtatttcaggagatggggtgagagggaaggtggataaaaataggcagcccagtttcacaaaggcttggttttgctttacaaatctgacagtgttttgagaaaggaacacagaacattgccagaaggagcctatgattgaggtgaacctcacgaatgtctttgaaaacctgactctaaccaaaaagtatgagggagggagagttctggctgctgtagacgacactacctcatgaaagtgacttagaaatcagcctggagtccctagagcaggtctaacaatgagggaggcaagattaaaatggagaaagaagcctgctaggggttgcatgagctggttgagttcaccaagccagattttccaacgcaacattttatgtgtgtgtgcttgtattcgtttatctggggagagaatgaataactttccatcagattttcagaggaacctgtgaacccttcccctgcctactccctgctcccaattaaaaactacagaaaaaaatcacaactataaggctggcacggtggctcacacctgtaaccccagcactttgggaggccaaggcgggcagatcacctgaggtcaggagttcgagaccagcctggccaacatggtgaaactccgtctctactgaaaatacaaaagttagctaggcgtggttgcgggcacctgtaatcccagctactcaggaggctgaggtaggagaatcgcttgaacccgggaggcagaggttgcagtgagctgagatcgcaccattgcactccagcctgggcaacaagagtgaaactctgtctcaaaaaaaaaaaaaaaaatcacaactatagattacagttctagatcttagtggtctgaattatgtggaaaaggtatacaccacacttcgaggactggctactttcactacaaaaaaatggagtcaccctaagctttttgtaagaagcatgtattgaatttgtaatcattgtaaagggtttaaaaaatggcatttctcaaaggatggctaccattttgctggagccaaagaagtatccattcttatttatgatttctggggcctccctgacccaactacttgttcaagacttttattttgacttagaatgatgtaaaaatgacttctgttttggtgaaggaggctgaaagtgaacggaaatgtttgtagagggaaataaagtataatgtgccatttcacagatcattgaattagaacagaagactcccctttttaaaatgtttgctgctgcaactgtgtggtacaatgaaggaaaattcacgcttgcagatgctttgttcaagggcatttgtagtttccatgtgtgttcaactgacttctaaaggcctttcaaacatatgatcttgcctccacttcctgtgaaattaacctcctttctttaaaaatacaatgatttaaagaaaattgccaccataaacaaagctaaaagactaggggaaaatatttgctgcatatgtagtcaacaggattaccatctataatatataaagaggtcctataaattgaaaatttggccaggtgtggttgttcatacctgtaatcccagcactttgggaggccaaggcaggagaatcactcgagctgaggagtttgagaccagccctggcaacacagggagaccccatctctacaaaaattaaaaattagctggacatgatggtgtgcctgtagtcccagctgcttgggaggctgaggtggaaggaccacttgagtctgggaggtcaaggctgcagggaactatggtcacaccactgcactccagcctaggtgacagagcaaaaccctatctcaaaaaaaaaaaaaaaaaaaaaaaaaatcagtcactcaagaaaatggtaaaggatatgaataagtaaatcatagaagaagaaatacaaatagccaataaacttactagtaatcacaagaaccgtaatgagaaaaacaagaaaataggacatttgcccatctgatagcaaaaatttaagagtgattatatccagttttcaatataaaatgataatccaatttaataaaatataccatagaaatgataagcacaaacaacttatgacccagccaatccacttccagaattttattctggaatacacatgaggccaggtgcagtggttcatgcctgtaatcccaacactttgggagaccgaggcaggcagatcaccttaggtcaggagttcaagaccagcctggacaacatggtgaaaccccgtctctactaaaaatacaaaaatagttagctgagtatggtgacacgtgcctgtaatcccagctactcaggaggctgaggcaggagaatcgcttgaacctgggaggcagaggttacagtgagccgagatggcgccactgcactccagcctggggacagagtgagactctgtctcaaaaaagaaaaaaagaaaaagaaatacaaattgcccatgaatacatgtacaacaagtacaaagctattctgtgtggtggtgttcatataagctaaaaattagtctcagtgtaaatgtttactaacaggattatcaattaacaaatcccctgagaccagagcctctttgccaaagtggagctgatggttgaggaggagattttggcctcagcccagtcactggcagaggagaacgttctactcaggccccatgcagtatgacctcacgccctgagataagagtctgggatctgatctctcctcacctgaaggagagcaagaaagagaagaaaagaaatggcctctccagagggcaaggaaaggaaatattgtcccactgaagtacagtgagcagggcatgtgtgttcccaaaatacttcccagggctgtttaacctctgatagcagagtctcaaagatattaggatgcactttctttatcagaagaaataccgtaccagttgcaatattctcttaaattaggcaattatccccagtattgctggcttaaggagtctttatgtaggaaaccttatttaggaagagtaaattatgacctttcacaatctataagtgaagggctgactgtttaccaatgtatttgcaaagtaattgacatgggcttcctttaattaagagtttgggccgggtgtggtggctcacgcctgtaatcccagcactttgggaggccgaggcgggtgaatcacaaggtcaggagttcgcgaccagcctggccaacatggtgaaaccccgtcactactaaaaatacaaaaattagctgggtgtggtggcgggtgcctgtaatcccagctacttgggaggctaaggcaggagaatcgcttgaacccggaaggccgagtttgtggtaagccaagatatcacaccattgcactccagcccgggtgacaagagcgaaactgagtctcaaaaaaaaaaaaaaaaaaaaaaaaagagttgatacacataagcatttgtttgctggaagcaaagaagtctgaacctaaattgtttgaagtcactctgatcattgaaaatcaatcaataataaagatgaatcatcattactgtataatctgtcattgggcacatgtaactgaatttactaaaatattgatttctacaaagattttgaggtcatatatgttgcaaaagctagacagtgcattttaccagctaacctgaacaggagcattttcacttgattaggatttccataaatttctgagaaatactgaaaatatttacatcatgttcatacacatttatagtctgtgaggatatttcaggatttagacaaacatattttccttcacagcagggaccatattatcaccatcttttagagaactactctactaggaatgttcattcctatgtggcaaaattgggagattttcttttatagaattttctgaaatttcatttcttaactctttgtttaaaaaaaataataggggatggctgggcgtggtggctcacacctgtaatcccagcactttgggagggcgaggtgggcggatcacttgaggtcaggagttcgagaccagcctgaccaacatggtgacaccccatctctactaaaaatacaaaaatcagccgggcgtggtggcacacaccagtaatcccagctactcgggaggctgaggcgggagaatcacttgaacccgggaggcagaggttgcggtgagctgaaattgcaccagtgcacttcagcctgggtgacagagttagactctgtctcaaaaaaaaaaaaaaaagaaaagaaaagaaacaggggattatgtttctagagtgaacagaaattctggaaaagtctatcttctccttaccaattccaaattgacggtatccatctcataatgatccaaaataacaaattttttttttttttttgagacagagtcttgctctgtcgcccaggctggagtgcagtgacatgatcttgactcactgcagcctccgtctcccaggttcaagcgattcttgtacctcagcctcctgagtagctgggggttacgggtgtgtgccaccatacctggctaatttttctatttttagtagagacagggtttcaccatgttggccgggctggtctccaactcctggcctcaggtgatccgcccatctcggcctcccaaagtgctgggattacaggcataagccaccctgcccagcccaacataacagattcttaaataatgtttttttttttcttttccacaagcaacgcatatttgatgtagaaaatttcaaaaatgtagataagcaaaaagaaggaaattaaaattacctgtaattctaactcttcaaaataatcactgttaacattttgaaatatatcctttcagtgtttttttaatgtagataatggttttctgactaaattgatttcatatgctatatacagttctttttacctattttttatttaacaatagattaaggatatctctctaggattaactattcttctacctaatttttaacaattgcatagtgctatcagtcccctgggttgttttcaatttttcattattatgaacattgctgaacaaggcagcaatgaatatctttgttgttaaaccctttttcacatccataaaatggatacatctttgaaagcccatagtcacaaagtttaagcccctatcttgacgttgagctaattcaagatgaagtatgatttctgtggggattcaatagaacaaaaaaacctataactccttggcttttgttttccaaattactgtcatgcctgttgggatggtggggggcaccccctaatgacatatgtgtagagaaacttctttaaattttcaactcctagctaaaagtgatcgtctagtattatttcagatatatttgtgtttaagaaatgttgataagcagccattgaaagtgattgtactgaaagaatgtgttgttattattaactaagatgcatttgttttcatcataaagcagcatctctttattgctttttggttacctcgattttctaaaagaagagcatgctccttgcttggccaagctgctgcttagcattcttgatacttacattgcttatggaccgcatttgcgattgaggatctccaggtatacctgggaatgatcttctgcataaaatagaccaggtctggatttagaggcacacagcatcttggtcccagaccacagtgaattaaatcataaactcctggcaaatctgccctttggaaatgaagaggatctcacatgacacatggattgatataaaaagacaccaaaccacatgatgcagaaaatacctaaggaaaaattccagctgtgaatgcccactctaaatccccactaagccaattagtggtcagggtggcagaggaagcactttgttcggcataccatcattggtaaagagcatgaagttccgctctgccaagagagtaacagaggaatgcctacctgggaatattgctgataaaatgtaaaataaccaaggagccgggtaggggtgggggtaaaatgacagaagtatttgaagtgagactaattgttatttatatgcatttcacatactgaaggtggatgggttccttatttaagttttttttgtttggttggttggttttttttgagacagggtctcactctgtcgcccaggctggagtgcagtggtgtgatctcagctcactgcaacctctgcctcccgggttcaagtgcttctcctgtctcagcctcccatgtagctgggattacaggcgccctccaccatgcccagctaatttttgtatttttagtagagacggtgtttcaccatgttgtccaggctggtcttgaactcctgacctcaattgatccacccgccttggcctcccaaagtgctgggattacaggcatgagccaccatgcctggcctgaacatttttatcagttggattaagacagggtttctcaactttggtactattgacattttggaccagataattttttgttgggggctgggggtcctgtgcattgtaggatgctccatagtgtccctggaatctgcacactagatgccagtagcaccccttccctagttctaacaaccaaaaatgtcacaaaattgtcccccgttgagaaccactagattaagagatcattatcctgaaatactgaaaaactgcagacttgggccaaaaatcatgtcatgtgccattttatttttagatcagtgtgggtggaagtagtgccagccatcttcaagctgttagccaagacttgaggttcagtatagacctgcactctctgacgccatgcattctgtgcaaatttacatctgtgtgcaagttgcaccaaatctcaattgtaccagtgaatatcattgctctgccttctacatcctgcctcctataacagcaatgaaagtgtcctttctgttgttgaatgcattgatttaaacaacctctaaatctattttgaaagctatgtggaaggtaagtattaaaccaagcaaaactgaccctctgtccccaatgggatcttctaatgatgctttaggagatctcaggctatggtactgcccacatgctaatactttctacccaaacctagctcactttacaagaatcacccctaaataatttccactcttctctgttctaagactattttgacttaacttccttgccctcactccccctttggttggtttagctaactttatgacttactcatcataaagttagacaagtctctgcttttttaaacctccttggctactgctcagctaccatctttccctaaagtgtccccattgaaagtttgcatctaataacggaagttgccaacatcttgacctctttcagatatgacaatggatgatgttcgggaatacgagaaaaacatgcatgaacaaaccaacataaaagtttgcaatcagcattcctcccctgtggatgacatagagagtcatgcccaaacaagtgtacgtagaatttttaaaacatgttgcccaccctttcacaaatgcacatgtaaactgatctgggaaatactgcagatgcccggttcgcaaccttccatagaaacatgtcgtcacccagaccctgttgctgcagaacctgagctggatctaaattgggcagtgtcacctctctcttccagacatttcgatcccttaaagttgcttgacgtggaggttatttcggtcataaaaccaagaacatggagagtggaaacacttttgtgggactagtaaaacggcctgcaccataaaagagcagaggagtgaaaatcgatgtcatatgtaaactagaataacatgtcagtaacttttaaaaacatagctaacactcacttattcattcaagggagggcttctggctcatcagctattttaggtttctttacatttgctttgaaaagctttctgtggctctttatagctgttttacccaatcagttcctttttacttaggataatctcaagatgggctgcagtctgtgcagacacacaggctgagcagtgaaggggtgtgagctggggatgtgctgagctgcctagcagatccctgggacttagggtaagccttagagagcctcagttatttcgttgcacactggaaattgagagctgactgtatattgtatgccagcattttaagtatcgtaatctctcaatcattcatgctaatgaagggtagctagagataacaaagaaaagtgtaatcaccaaatcatttctttgcatcttcagccagagctgtgatctctttgggttccgccttgagtcctcatgtccattagcccagtctccagaataatacatagtaggtgttaaaaaaaaaaaaaaaaatcagctgggcgcggtggctcatgcctgtaagcccagcactttgggaggccgaggcaggtggatcacctgaggtcgggggttcgagacaagcctgaccaacatggagaaacctcgtctctacttaaaatacaaaattagctgggtgtggtggcgcatgcctgtaatcctagctactcaggaggctaaggcaggagaattgcttgaacctgggaggcagaggttgcagtgagccaagatcgcgccattgcactccagcctgggcaacaagagcaaaattctgtctcaaaaaaaaaaaaatcaatgctgtagttctaggaaatttagatgtggctgttgtcataaatggatcctttagaattgtgaagaccttctgattgcactttggaaatttttagttaaatttttggagcatgtctttggaatgtgccctgcaagtctcatgtgctgcaactggttgcatgtgattgcccttgaggttgcaagggccctaactcttctcccattttgcatgcagtgatctgatttgcaggaaactgttggagcaagaggcgtttcctctctatgcacagaccaattccagtaggacttccccctagaagtgctctttaaggaaactctccttgaatttctatcactttcaattaccttttcttttagaaatgttgggccccagttccccctcagccactctgaaagccattcactataaatatgaccaggcaaacaaaggaagaagccacaggtaaagaggagacaccagatggctaaaagatgctaagctcagtgattttctcacagcttataagccccttggcttggctttctttcagttttactgtgattattactttataattaaagtccatggctgggtgcggtggctcacgcctgtaatcccagcactttgggatgccaaggcgggcgtatcacctgaggtcgggagttcaagaccagcctgaccaacatgaagaaaccccgtctctactaaaaatacaaaattagctgggcgtggtggcgcatgcctgtaatcccagctactcgggaggctgaggcaggagaatcgtttgaacccaggagatggaggttgcagtgagcagagattgtgccactgcactccagcctgggcaacaagagtgcaactccatctcaaataaataaataaataaataaagtaaaataaataaataaagtaaaataaaaaataaagtccacttactatgtagaaggtgataacgtagagtggttcttcccatggaaaagcccacataatctctggctgcccctcagcgttgttcccgtgacttcagggtgaaagatgcctgccaccggagaagttacacaaagtggttattttgaatgcttatgacatttccattatcctttggaattccgtgaaattggagcacatttatttttccttagtctttctcctgtatcataatgaaaagcagtgaaaatcaggaggtggctctttgtcacaaataaaaactgcatgggtgctaaatgaattttagatcatcaacccaagcagggacaaattagattgaaattaggcaaaattaacatccatgaacacagcagtgaggaaataagtcttttcaattgagcaggttcaaagccttcaaggacgggaacttctaagagcctctgggagtggaaaatcaaaattctgtgctttagattatttctgccccctgctggctatgtggagtagaacaatgtattcagccacttgattaagaaagtctgctttttcaaagataatatccatttatcatagcaaaaacataacataccctgatacactaaaatttttctcagtctcaactttattgtgaaataaatgcctctttttatataaccttaatctcacttcttagctcatttaatagtcttccatgtttttaaaaattggtaagtttataggtacaatttttcttgatatatgctgaattttatatcttatccacatagtcataatgacttatatcctttgtaaaaactttccctttcagaaaattttaataattgttcccaggaaatcctcttaaggatttcattttgtgaaaaatacttctggtttgctcagatgttataaaacctaaagattaagctgggcacggtggctcatgcctataatcccagcactttgggaggctgaggtggacggatgacctgaggtcaggagttcgagaccagcctggccaacatggtgaaaccccatctctactaataacacaaaaattagccgggcgtggtggcagacgcctgtaatcccagctactcgggaggctgaggcaggagaatcgcttgaaccccggaggcggaagttgcagtgagccgagatctcgccgttgcactccagcctgggagacaagagcaaaactctgtctcaaaaaaaaaaaaaaagaaaaagaaaagtcctaaggattaatactgtgttatgaatattcattacatactcagtatttccaaagtggctatattgtttcctgctggttattccctccaatattatctaatgaagtttcaactgctaagtacatggcagtggacaagaaacaatgaaaaatgggtctctggggggccaaaacagatacagaaaatccgcgggcactaaattttgcattttgctccaggataagccttgggccttgactcagtctttaataagcccaggttcctcttttccctgttcccagcaagtaaaaatggcaaaggataccagggatagccagggtaacaataattaataataacagtaataaggctgggcacggtggctcaggtctgtaatcccagcactttgggagtctgaggcaggtggatcacgaggttaggagttcgagaccagcctggccaacatggtgaaaccctgtctctgctaaaagtacaaaaattagcagggcatggtggcacgtgcctgtagtcccagctattcaggaggctgaggcaggagaattacttgaacccaggaggtggaggttgcagtgagccaagatcacgccattgcactccggcctgtgcaacagagcaagactctatctcaaataaataaataaataaataaataaataataacagtaataatagagtttctgagcatgagagaagagatatcaagccataaagagcaaatagaccctgagaaggaactaaggaactgtatttttgcacagtgatatatcttcaacatattatgtctcaaatgtaggaagtatgtataatacattaaacacattagggaaagatttacattttttaaatactgtttttactttctcacttaaataagaacatttcaggtatttggaaaacctacattatccaacaatgattattaacagtggtatcactgtcttatttgttgaattccaagtcatgcttttttttcttttaaatagaatcctcactattaaatgatcctctcctttcattctctattctttttaagtttcctcaagaaatggttttattttcttggctttggaatgattagcagggtgtggtgaaattgttgatttacgtgtttttgaaactgaatttattaaaacacaatctctgaaccttcttaggatcgacacacagtcaggaaaccagaaacaacagcatctttgtggcccctcagaataaaaaagtatatgtattgattaagaagatagcatgttggcctgagtacagtggctcacgcctgtaatcccaacactttgggaggcttaggcaggcggatcacttgaggtgaggaattcaagaccagcctaggcaacatagcgagaccctgtctctacagaaaatacaaaaaaattaaaccaggcattatggcatgcacctgtggtttcagcctcacggggccctaatgcaggaggatcacttgagcccaggaggtcgagactgccgtgagtcatgatcgcaccactgcactccagcctgggtgatgcagtgagatcccgtctcagaaagaaaaaaaaaaaagaagatagtatgttgaaaaatcctgatgatttacctgtttaccctataaaggtatactttcatgatctaaagttgacaataatgacaataatatgtgtcatttcagggccattgattgttttaattaccttctctttatgaaaaatatgaccagttaattatagctccaaataccccacaccagacccacaacaacacagatgcacacgggtgcacacacatacacacacacaggcacatatttcccccgtctagttctgtattctactgttaagtccttattgagaatacttaaaatactcactgtgaagagtgctttggaaaatcttaaatggataatcataaagggatattgttttcagggtgtagcttccaatagaaaaaattgggggtttggtatttcaatgatactttgggtgtataatcgggagaggcccctttatgatagggttcccatagttcctgtaaaaacaagggtagtgatgaatctatttgcctctcttataaataactgctcgtttttctttctgtttttctccttgaagacatgacaatggatgaagtccgagaatttgaacgagccactcaggaagccaccaacaagaaaatcggcattttcccacctgcaatttctatctccagcatccccctgctgccttcttccgtccgcagtgcgccttctagtgctccatccacccctctctccacagacgcacccgaatttctgtccgttcccaaagatcggccccggaaaaagtctgccccagaaactctcacacttccagaccctgagaaaaaagccaccctgaatttacccggcatgcactcttcagataagccatgtcggcccaaatctgagtaactttatataaatatctcatggggttttatattttcatttgttgttgttgtttttttttaagaatcttctgatagagaaaaagactgctttgtcactcaaacatgttccttcgacctttcagtgtgcatgtgactcagtaacttcacatagaatatgattccctaagtatgctacacagcatcatattagatgtaagatgtaagacttgcaaaggacagaaggaatcttctgtaaccacatagctgtatgccagagaggaagccttgttattgggcatttgatgaggtttggcatggacttcaaggataaatgaatgaaaactttgcaccacttttgttacaaggtacggtagaaaatagtgaagtcagtttcctctcatcaaatctaaaattctccaaaatactctcaggcataacatacttagctgttaaattttgaactgctaattactaatacttgaataccaatagttactgagattcctattttgtggttagtctgactcaggatttggagcctaattaactctaaacttttgaaaattttaatcatcaagctatagaggctccaagtgcaattaataataactcatttataccttccacagaatttaataaagattctacttgtttctgtcttttaataactttccccttttgtgcccttgtggcctcagaaatccttaagaattgcatggatgaatgtgaccataactgattttggaatggttcagtttaggaaccaagaggcccaggtgaggcaacatcttttttctctacaggtaccaacaaaccttgacttgtcagcttccatcatcaattaagattctcagaatttgcaattaattgaatagaattcatttactatctgcccactcaaagaagtacaagggtagagtaagctaactgggctttaacatggtcagaatgtctggtgcatgaactataaaaaagagaactgtctcccatccccttccttgttttactcttagtaacatccagaattccctggaacagattgcctaccaccagaccttagaaaagactgtcattctcttgctccttacttgaaatacaaatattgggaatgtcacagacatcaagcaactactgtcaagtgggaggagagaatgagcagaattgctgactcctatttgtagagtgaaaaggaggagtgataatagatgcccttctgtctagctttcctttcttcaactagtggtaatgcaagattagaatcaaggttgacaggaggcaaggtcactcactgaagtgacagaaagacaattctcctttgctccaaagagagaaatctgtcacctttgcacctcactgcctttaaacacagacgggagggcaggccaaatctcagcattgacttttgtcctccaagagaggaagagaagaagtaattgggcaacttggaggcccacgccccagctagccttcctgatcgtaacctccaacctcaggaaagggaccttcccaaaacacagatcccaaaggaaacaaaatagaccaaggagcataatctgcttctctcacacagcctctctgccagtggaccctgcctgcttccctctcagtgctcagcactctgtgtagtgtctttcaggttgatacactctcccaaggtgcaggcgctggccccatgagcccagcaccaaagttttctaagtcataggtcagactgtcaagatcatttctttatctataggttgatatttagcttaaaaaaaaagaataaacctagaactcaaaggaaacctgttgcaaatagcttagatcaacagtgtatctcttccctaagaatgatagtatcttagtaagacaccttctatgcatggtatggaagcatgatttttgcttgtgggaaaacctaatattttatcagacccctcggacttctcaatccctccctctccacacagtagtacttaatgaaaatgttttgctttagagagcaaaatgctactttcagaagacactgaaatagtatatgtatttgcttaccatttgcaagctaaaatcaaggtgggatggggtcattattttcacatagaatgtatttattttgtgcaggctgttaaacacatctggcacctagtttttccattaagagcattgctattttccctttttataaagtagcttctgctgtcaaggttaacaattctatatgctttaggaagctaagttctaatttccttttgtgagtttcatttcttttataaccagtatgttaccacagacatcagttgcaaagctacgatgatagtgtgattcttagccgaaaaaaaagcgtgtgctcttaaagtatgttcagtttttctgtctacatatgctttgtgtgagttaaaaagggggtgggtggtgtaaatattcctttagctgctttgcatatttaacccagtcatcaaaaggcataaatgacttcaatattttatatatcttggttttcaagtatcatttcacattctctatacatgactttgttattgtggaatacaagcctgcaatggatgtatatatacagaacattaataattcttagaaggatggaagccaaatggctgcatgatggaaattagaagaaaaaaaaagcagaaacttgaatttgctaagcatgtttggggggaaatagaatccttaactcagtgcctctgtctgcgatatggaaaccttcaactttgttcaccaaaattgtattatacctgtgtatatatatatatatatatatatataaatataaatatagtatagtgaatcagacaccatcagttttaagtctctggtagccaaacttaaataaataatccatagaatatcacatacgttcactccatcttcatctctgaagttagtggagaccatcaaaatgactgtacatttcataactctgggaagatttcaaatgtgaagtgcccctgtgcattttcttggccatagcacggcattcttgctttagctgtgctttcctgggatgagaagatcttggtgtatttaacacataagctttgttagaaatcacctctgaagatcatttcattttctcactttgggttgttgcaagacaaagcaaaggaaaaggaacacaatgaaggaggccgtgacatttttagttgccaccgttgtaactcaaacaatatgggtttgttggtgaactgatttatcaaggcttctgttacggttttgcatctgtgtgtgaggaaaattttaatttatttggaagtatttattagccatgttgttggtcctgaaaataaatctctaagtagcacagttgtgggtatattatgcagacacttaccacaatacctgcaaaagtaactgtggttttctttcaagacactgtaataaacagtgaactaagagaatagattctgatacatctcgataaatcattctctgcaaaagtttcagggctaatgtatttatgtgtatttttaaattctactttctttggcatctcttcatggctcagcgacaacaaagtaataggtcattggctggcttacgtcgataggaattttactcttaagaagggccagtgtatagctgactctacatataatgtgtaatcagataatccaatagagaggaattgtccaaatagttttagtacctttctgatcatctgactcagtaggctaggagacaatctgtcatctgagccatagttcttgagatttaaaaagtctgtccagtgactgcaatctgattatgaataaactattttaactattcattcttgctgaaactgaagtgtacacaatagcacactgttggcatgctgaggcaaaacattgggttcttttgtgttctaccttcaaaacaatctgtttgcatttgaaatataagtgtttaagctttttaggagttagtgtaataagagaatgtgaatatgttgggaaattttcagatgccattaataattgtaattttgttgttaaattaacaaggactttaggataagcctcttgatgttttttgctttaaattgaaagcatgtctgtcaaattgcaagtctcccttcagtttctatatatcacccaggagagggtctctgagttggtgttgtacctgtaccactcacatgtagctcaagtgtaatttgtagtgtttacattcaagctgggatcttgattggttaaattaatccacataccactgccactgctgaaggaccaggtgttggaatacacagcattacagactataagcaaagcaaacaaaagttgatccttacatatgccatccttctgtgtcattttgtggctgttctgtgtttttcttcctagttatttattattgttaataacttactttttcttacattctgttgtaaataaaatacaaagcaatcttctttgcaagcgtagcttcctctctctctctctcgctcgccctctctctctctctctctctctcctctttagctattctcgagggaatgttagtaattgttcacctgtgggttgatgggcttgcttcttttcctctatggatttttttacccatccccataccactgccactgctgaaggaccaggtgttggaatacacagcattacagactataagcaaagcaaacaaaagttgatcctcacagatgccatccttctgtgtcattgtgtggccttgcctgctagtaggcatatggcaccttcaggacccttggtaggaaaagtctgagtgtctgcactaattatccagccaaaaattacacaaggtggccagccaggccaacatggcgaaacaccatctctactgaaaatacaaaaatttcccagccgtggtggcacacgcctgtagtcgcagctactcaggaggctgaggaatgagaatcacttgaaccctggaggtggaggcttcagtgagctaagatcacgccactgctgtccactctgggtgtgaaagagcaagagcctgtctcaaaaagacaaaacaaaacaaaaaaaccctggctgaggccgggcgcagtggctcacacctgtaatctcagcactttgggaagccgaggcgggcagatcacgaggtcaggagatcgagaccatcctggctaacacggtgaaaccccgtctctactaaaagtacaaaaaattagccgggcgcggtggcggtcgcctgtagtcctagctactcgggaggctgaggcaggagaatggcgtgaacccgggaggcggagcttgcagtgagccgaggtcacatcactgcactccagtgacagagcgagactccgtctcaaaaaaaaaaaaacccgaggtgaatctgtaacccagtgggatactcatgcatccgtccaccaggtgcttggttccctcgcctcgaatgtgaagctatccaccctgagggaatctgtaggaacaccatcccagtggtgttcctagattctctccactgaaggttgggccagtttttaaggtgagctgaaatcactctgatgtggtttctccatctcaggtagctcctgtacacaaaagggttctctgcagatgggtagtctgaggacagaaacttttatttctttggggttttttttcgagtctcactctgttacccaggctggagcgcagtggtgtgatcacagctcactgcagcctcgacctcctggactcaagtgatcctcctgcctcagcctccagagtagctgggactacaggtacacaccaccacaccaagctaattttttattttttctagagactggttaaactatgttacccaggctggtcttgaactcccggactcaagtgatcatctcgcctcagcctcccgaagtgctggataattataggtgtgagccaccgcacccagccagaattactttctagccccctgctcgttagtctcctgctaaaacagcatatacctct

SEQ ID NO: 467 - DNA, 27699 bp, Homo sapiens
  source 1..27699: mol_type = genomic DNA
ccgctgggccctgcggctccagaagccaaagtccgcccgtggggaccgttttcctctccactgctctcaagtgaacaacatggtgggaggtgaccctcgtccaaagggcttttatctgccccccactgctgcgtgatccctccgcaagtcggaggcagagctttaaaaagaaagaaagtgtgcgttgagcactgatcttaaatcggggacattatctgcgatctctttaagtggcagcagcagtttcttgcagaacaaagactcagtgttcgagctccaaaagcttctaggtaaagtttcattcagatgaaagcaactaaggcgaaaaaacaatgatattgtcggctccagaaaatcggcggttactttttgctctaagttccccagcgtggtgtttgttctcgcccactttggttgtgcggggggttgacaagcataacaaaagatctcagcacatccctccccccacctccacaacgaccctcctagcgccatgaggatgaattctctgggactaagtggtatttgtttctatttgttatgaaatcaaatttcacatttttttaaagctgaaaatcgcggataaagaaggatcgggtgcttaaagttcatttaaacactcacaccgaactcattccctgtttagatgtcagaggatggcagggagggccagggctgtaattcatcttgatttgcttcattgtcctgcagtttgcaaactataatcctgtataatttcaggaacaagcaggtttagaattaatgggtcaatattatttaaaacaaaacaccgggagcatgacctttgcctcaactacatattgctcgacaagactcaggaaactccactctaacctctcaacccctgagttctttgagaaactgaagggctgtagttattagaaatcatctttgtttcttttaatgtctccaaaggatttggaaatagtaatgcaatataacatgaaggatctctctacttaagcctgaagataaacgtggaagcctaaatattttgaactggagatgtttccctgtaaatttattatagatgtattcctcctgagagaaatgcatataaactatacatgtatacatgcacaaatatttctccagaacaatttgctagaggtgtaggtttccccgtaaaggagtaaacttgagagtcattttaagctgatggacttgctaaatttctttcttcttttttctttttcatattatttgctagccataatggaatcctctaggtttaagccaaagaaaaattggagagacaaaattagattttgtagcccttttcccccccgggaatgcctttttttttctttttagtttctgatgaatggctatcatttatttctaccaaatttaaataaggactgctgccttgtatgtttaactaggcaggcagagggaactggtttgtttaggaagcagtgactgagatgtcctggccaagttagtgacagaggaggggagaaagaatccagaccaatttgtatgcagtatattttactcccatgaaataaaacacatttgtttcatatttgctgaaaagtaaaacaataatattgtacgaaatgttatacacagggtaggttgtacatagcagtttcagaaacatcattgcatccaccagagaaactattctaaaactgatattcacacattttttataataataataatatgttagaaacatacagtgtggcatttagtatatacactcccttgctcgcaagcgaaaaatcctaatcgcttctgtataacatgctttattttaaagcctaacctttaaaaacactgttgtgatattactaacaactgcttttataaaattaatttgacatttcgatatatatacatcctttcagtcatttaaatgttaacaatgctaaacttaaaaaataacaagcttatagtaatgttaaaatgtcatatccagtcaaacatttgtttgtgtatgtgtccttgcaactgttagaaatacttgtagtgaaagatgtcagacactgaggacatccctttgaaatcaaaggagctctctctttgattcagtggtttccttttctctatatagcttctctttctctccctttctttagtgcccacgaccttctagcataattcccagtctttcaagggcggagttgccccatccggcaaggtcctaggatcccggcgctgtgggtgcggctcacacgggccggtccactgcatactggcaagcactcaggttggaggccgggttctgcacgctggcgtagccgaagctggagtgctgctttgctttcagtctcaggctggccaggctcgagttacacgtgtccctataaacatacggaggagtcggcggcgcgtaaggacaggcaggcgtcggcaccgcggaattcagcgacgggctactcaggttgttcaagttattcaggctgttgagactggagcccgggacgcctgtcactgctgagggcaccatgctggacgacatgctcatggacgagatagagttgggtggggaaaacatgctctgtgatgacagggggttgacgttcatagagttgaagaaggggaagctcttggtggatagggaggcggatgtaaggcccttggcggcccagttgttgtaggaatagcctgggtacatgtcgtcgtagggctgcatgagcccattgaactgcggcccgaagccattcttgcatagctcggcctgctggttgcgctccctctttctccatttggcccgacgattcttgaaccaaacctgggggcggttggggcaagggagcaaacagatgccacagtgcagattactaaaacttccatcggaggccaacccccgccttcccccgacacacacgctagcgcactcacacaccctggcctcgcttcactgcaccgccctgcacaccaagataccagggccagctttcagttactggcccgggtctccaccaagcgcaggagacctggtctgctctggcctgcgagctgggactcggagctacgccacaaacctcagccgaacgcatggagacctgcggacggtttgatcactcagccaggcgtttctccaggtccaaaaacacttaatgtaaaacaaacgcggggcagcaggcttttccaacccttcccggggcaccttgcaaacttgcttccattccaaagccacagacccacggatgaggagaaggggctggaagggcactagaggatcgctctttctcccacgcaattcctcccttccttccctgacctccactgtcgtcccccaccccctggtacgtgctcccttaacagggactaggccgccaacactctttctcgcctagcaaaacaaccaaataaagagcaaaagaccacctcttcgtcagctcgttaactccaggagcttggcatattaaactccgggaacccggaaagggtagttttggagattcccccttctttcgctctgcctcttctttaccctaagcccaccacaggcctgtccgcgcgccaggcccagccgggtcgtttggctttgcaggcggccacccaggccggccggcttccacccgtgtccggtggcccagccgcaaccccgatcccaatccacatcgggcctccctgtcgccccagacggcggcttttgtgtattggagagaggcctggcctgagatatccgagctgacaccagtgatgtttcacattacacatctccgccgggcccagccgtgtaatccgctttttctctttttcctttcattcttgatttcctttttatcccccttcctctttgcacccgactgctataaaaagcacgcctcactcccacttggctcgacaagcagccgccctggaaggagaggcagctgcaaggagagcccagcgccgcggctacaaagcactagggtggagctgcggaatagcgggcggggtgggagggcgttttcgaaggatcccagaaaacccatagactctgtctttaattacttgccatttctaccctaggccatctaaactttgctcaggcgagaagagtacgtgagaggcccgttcccttgatgtgcaagagagctaatgaaagactgaccttgctcaaaaccacgccgcccaggacccagctctggctctggacagttaaactaaaaccattttcaacttcttcccggccttttatccaccagcatagcctcatgccttgcacaaatgccacccagagagtgtcttcattccctctgatttgggagagcattttggtctttattctttttatcgttgttttcttctttttgtttgctctgctctaaccgggggctttattttttctacccagagcacttaattttttttttttaacagcaaagcctctggatgccgcttgatttgcttgattctgttttctgcttccagaatcctaacaaatttggaatcttccaccgaccagcataaaccaggacgttgctattgggttatttatttgagctcatttttgccaatccataaagtacagatttgctacaaagttaaggtaagccctttttacaaaactatgattataatttagaagagggggtgtgagtttcaatttccagagttcaactcctgagagaagataaataaaccaagcagaaaagtctttcttctttttttctttctccttctaagaggactagtagttgtgtattaaaactttgctcccggagatcacaaaactaggaaatagggtgtgtgggagagacctgaatggccgaaacaaccgtaaagaaggtgtaagaagcgcgagcccaggagggaaaaagctgggccagggccgggacaaaggtttcccagggagggccaactcttccgtgtctctggcgggttttccttgttaaaggctcacaggttggagcctgttcgcggctcttggcctggtagggattttattagctctgctctggcaactgcaagccaggaacacaatgtcctgtgcaggggattgcccatgcagcccagctcgtgagatcgcgggatggcggggcagtgagccggtgccgctctgggagcctgagccagggcggcagtcctgtcggcctcggagagggaactgtaatctcgcaaccaggccgccgcgaggccttctgcctttgcaaagctgcgccccaccggcgccctcccaggcggcgctgccttccacattctctcctggtctacttggcctgtacctccacaacatcctccccccatccctcccagactccgtgctggctcctacccggactcgggcttccgtaaggttggtccacacagcgatttcttcgcgtgtggacatgtccgggtagcggttcctctggaaagtggcctccagctcctggagctgctggctggtaaagtgagtccgctgccgcctttgccgcttcttcttagacgggtcctcggcgcccacgtcctcattcttcccctgctggcttttatctttctctgaaaacgaaacacacacactttcccgtcagcatgcccacctgcaacgcggacgccaactggaccggcggcagaagccgtggaagagctgggctgcctggcgccggaggagggtgcgcgcggcggctccgggccgcgaggagcgctgcgcctgtggggtgtgcaggcgcaagtgtgggtgtccgcgccccatttcctcccctcccccagcgccgcacgttttatttacatgtttatctcactgcagcggcacattcacttttatagcctgtgctttcaagtatatttatacacctctgcgcagacacaccaaatctcctgggacgcgcacacgcgcgtggtttacagacccccctccccctcgcagaaagctcagatttccatgcggtttgggaaggctaggaaaagatgtggggattcggttgggcaccgaagttcgccggccctttcccaaaaaaaaaaaaaaaatgcctcttcgcgaagggcatttctgagtggtttcaggcaatttcctaacgagtggagctcctcgggagctgaaagccgagaggaaaacagggacagaggtcggcggcctctgaaggtcctcgaatcaagatgctgggatttttgtgacccaggaaacagaagggaggccagggtacgaatagagagggcggcagaattgctcgcgcccttagcgccccaggagccgggccggtcgagggagaactaaagggatgcggggtagtcaaaattccggctcccggaagttctgcggggagccaggcgaacgaccactcccaccacgcctccccccggaggggctgacttccttggggcgagagggagcgggtggcgcagagcagctgagcgggaatgtctgcagggcggcgcggcgccttacctgcggcctccgggctggaggtgtcggagatggtgtgcacctccagcctgtgcttggaggagtccagcgaccggggctgaccgggagccagaaccgaagccatggctaacggctggggatggtgacaggaagatgaggagacggccgacagcttggtccccgctgctcggtgctccaagtgaagcgggcctttcatgcagttcatggacgagggagcgcgacgctctactagtccttggctactgccccgccgagcccccgtagccgccgctgcccgctccgggtcgcgctctaggcgcggagtttccccgctgcggggagagccaggggacgcaacccccgccgagttctcaagccaagctgcccccgtctcctccggaaggctcaagcgaaaaagtccggagacggaaagtcagcgggcaaacgaagacatgggatgtgggcagaagggcaccactcagagcgtctttagggagcaggcttccaagctccaaagcgaaacaagagtgggcaaagacccccttcttctctccctccctcccccaagaacccctccaataaggaaagctaacgccgaccgcgctctgcccgccccccccccacgcggcagccctgacagagaagtgtcaagagtgacagggacaggtaggtgatattagatcccctgcggcggcagcagccgctgcagccacgacgcggccctctgagcgcaccctccgcaacgcgcacacgcacacccctcgggcggtcgaacaggagccgggccttgccgcagctcagctccaggcacccaggcgagcgacggaccagatctgcggctccgcgcttccctgttggcctaacatcttaaaaccagaggcgggcttcctggtgccgagacgtcactccgccgcggccctccccagccctctccgcctccgcctcctcccagacccttctccgggtgcgactgacgtggctccgcaccaatcaggacgccccgagccgcggtggagggactgtcctgcctgcacctatcagcagtgcggggccgggctactgcctcgccgtgcgcactgggtctacacaggcaagctcccgggaattcagctcctgcccagcccaaggcgatccggcttttagtacgaacccaaaggtgaagagatgaggctaggagtcgaaggcttgggagaagagagtggaatggtcaagaagagaaaggtacaaggatcaacaagacacccactctttgtgtctcactacatccatttccaatcccccaccccatataaaaaggagacacgttacttaaaactagaaaatttgaaaaacagcaacaaatcacctctccgatcttaaattttccaaacagcctgtcaagtgaatgctgcgctaatctgaagaagctttaattgcaaagaagacagagccctgaaaaggcaggctaataaattagaaatcgagaagcaaatggacccgtcaaaagaaaattaccttgactttaaacgaacaactgtttggtggttcactctggatttatacaagaataaaaagtcgcctcagatcacgttctctgtgatgcttattagtccccagacagaaaacacacaatagaagagaaaccctaacccagcgttttcaaaatgctgaaagcttatccattctacttaacgttgattaagacacatatcctagatctttcaaattccttgtacactgtattaagctcgtcctaacccgagagagccacgctttaaattcgactctcttgtttactttattatcaatcagatttaaatccataaagcctgtagaatcaacaaccttgagctaattatatatgaaatatgccttaatgaatttccatacaattaagaatgttgccaaataaccaatttcaaggataatttttaacagtcattttcttttcccagtgagctcaaggctgtcttgagccattaaagtccaagcaggcagaaggggtgtgtgtgagctaagggcgaaaagcctagaactgcgctcaactagcaaaagcaaaaccttatttatataaaacaaaaaaaatcacctttggagacatcaactctttatagcactgtttccaagcaaatttaatttccaaagaaattaaagaaagaaatccaaacatattcaaaataatttttgaaagtccttttgtcccccagcataggtcagctggagaggacaaactaatctcctctgggtttctgcatgggcgattgttttactatggagttagtgttatcatctctgaatgtgtatttgtttgacattacagtcaatgatttgcaatgccagcatgaagtatctttaaaacactccctccttgtccttgttcacaagattgggaaacttattcgatgtggaacaaagtggatgaagcagactacaaatatatttgcaacttatgtgtctctcctttgccctgaccacccccaaaccctatctgcaactcctccccattttaaacttgcagtccaaagacgcacatgagaattgtttttcagtctttcttcaccagtatcatcccactttaagaataatttagctgcaagggaggaatttcttcatagtaagctttaaatcagcatttctgcttttaaccttttattccactttaccccattccacacatacagacacctgctcagagtaaaacacatcctcatgtgacaggtctgcattagctgaggctcatacatccagctatattaggtcctgcaatcttatcactaaattatacacattacactagcagcctgttggtaaagaaggttaaattaatttacattctgctcattatctggtgcttaaatgacgcattttatcccggagatttggcggagaatctccttctcagaccccacagcgtttcactgaagacaatgctcttacatttgtagtggtttttaatctgataagactctaatttgcttaagtcttttaaataagggttttaaatgtttctagccgttttcttattgaatttcctctaattcccccaagatcataaagtatatgtgtaaagtaaatatttcctcccattgcactgccagccgatgacctataactaagtcaataagaatccagctcttttctgctgaatgtgtttactaatcatattccagtttcttcttttaaacctcagaatagctgtggtccccacaataccatgccccttaaagcttcatttcatgaagggactccatcacattaaagaatgaaaaaaatctccactgtagttagtatacacagcccctcactccttgtttttcaagattcaaaccccagagctgcaaatatttttggaagcttgggtgttaatgccttattttagaaagccgagaagccccacagagccatatagatttctaaacccatctctcataaacccacagaattttgataaaagctctggtggctccactctaccgatggaactttcatcacgacaaatatacatgtatgaaggacctcaatcagcctccaaagtggttgaaaaacccaagggcacgtgactgctcctcatagtgccaacgtgtgcgagatgttggaagcactggggatcagcagcagcctagatgcctaaaaagataaggtgtcctaatttgtgtggacccattgaagtcaagtggtgaataaagacaattatctagataattcagattaaagtaaaagcaaaaccatatctatttgtatatatatattcacatccattttatattacagacacacacacgcacacacacactggctctgtaaacaactgactcaaagtgaggattttctttgcatttttccagcaggagtttcaacattctcctaatctcctaatcactttacacactcacagcagcggcgattgggtgacattcttctcaggccccctgtgtggcaggacaccaacatgataagtctgcatggggaaaaggaggtatgtggtgggaactaagaaacactgtccagtgaaaactctgtggcatggtggtggttgattttggagatttaatgtacataagacttgtgggtgcacaggcataggcagcatggatgagaaaggggccagaagaaaataaatcttatgcattttgtgattccagcattactgtgacctctggctaagttcttcttaattggttttagaaattactatgagttcagcctctaacacagaaatttccaatacggagaacattggtgggatcctggtagggaaactagaggtgctgcatggctcacgtggggcaaagaaggaaagcccagtgccggcgtgaggttttgagtctgggagacatcaggggttgtctcgattggggtttcttgcttattctttcaaagaaagaccctagaggagggaaatgtgtgacatggggtcagccgtgttttgtgctggtatttgccaccgattaccagtcttaaagtcttatttaatttcacactcttcagtgttagttgtgcaaagtccctctggccatggcagtgagcggttgggctgtgccgccaaactctccgtatcaatctggcctgggactcaaccaagtgatctctgacttttggaaagagtctgtcttcagagttcacccagaagatggcttaattagacatctccctgagctgttaggccttagacgggtgggagtcctgccctgcccaagctagctcaaggacgaggcccgcctggactcagcttggagccacgtgatgggcgtgagtgtgtgagctcctggtaaggcgcagaggtcagatggagaccttgcatcctgcccgagaagtgccccaccccctccaatatctggcttttctctgcatacaaaccaagctgaaaacagtccactacccaccacccctcatagctatggaaccaaataacccagaaattaaaagcttcactgtagctgtccttttccccatttcctaaatggaatttaaaaagctctggcttgtcaaaaggggaagattattttctgaattggaagtctgtagatatattgagcaacagccaccctctctgggtccctgcaaatggtacccatttttccaacccacagctctagctgctcaaccatttgagatttggggtaactacctgggggaacagtgttcagatggcagtgggagttaccacctcacagtggcctggggaagagaagagaaagagattagaggagggggcatttgctaaaatcactcaacgaacatgctgttaatgcttcctcacatttgcatgttactgccacagttttcctaggtgtcactgagtctccagaaagcaactacttgccgaactaagtaaaataaggagaatggtatagcacatgtgtttggagaaggggaaggaagggtggaatatgaaattgagcatagatatccaggtcaggaaagaaggaagtggcaaggggctaaatgaagtcccacccccccgccacttttttaaacaacagttggattaaacactcatctgtcttcctctttttctcttttcttccctctccagcttatgtccatctcccttttctatttcttttgctctcccttctttctgttttctctctcccagacatgctggtagctaacattcagcattagttgtcatggtgaccataaatcacctaaatccaaaaatacccacctataatctgagatgaagcttttatttccctagcgaaataatattttaaaagctgtcagctgacaaaaaaaaaggaacccacctcattgtagtaacccaagtaatatattacttctaaaggtttaaattaaaatgtcagcctgttaaaaacatgctggtagagtcttggacactcttcccgtcagatcctcacaaagaagttgactctgtcattcctggtcgctctttaacatacacacacaattctgtatgctctctccctttctattaatttcttcctcccctaccaactactttagttctcaaagactctacgcattgggttctaaaagaaaagaatctcctcctggatcagaaaacagcctcattggttgctgaagtgaaagatgtggggtttagggggaaaggttattaggaccataatggcggtggtggtaggaggtcatcctagaggagttaagaagaaaaaaaaatgcagggagaaggactggaggtggaaagacagagtaacagaaaactgagctgggtggtcaggtgctgcggtgaagtctagccccgaaatgataggtatatattctcccactcctgcctttttctcctctgagagaaaactttcctagtcagagaccctggggggtaggaggcgggcaaacgccgctgcagttgggccttttgtcttctaccttgggcttgttgtcttttgcctatcttggattacagggtattcgcctagatgaagagccattaattacccattcagtcaatattaggaagacgacaaagctttttacataggattaagaagacatcagattgttccattagtatattcctgctcacgaataagctttcgttatacatttccttttcccccgagccgctctaacaactgctgcatatattagcagcgggcggtgaggaataacagccgaaccagccttaagaaactttgtgtaccgagtcagcagcgaggaacgcgacctgtgaagaccacttttgcgggcagggatccgcagggactgactactttcggacaactggtacaatttcccctgggggtgaaaaaccacaacgcggcggggcacctttcaagtgagctgcagatttgattggcgcggggggtgggggaggggaggggagaatgggatggcggaggtcgggcggaggaaagaaaatggaaaactctccttacccctatttcgttgctttttcctcaagcctcatgcccccttcggcaagcacctgtcccttccgcgctagccacagctagagttctccacctttctctacacatccccttctttctgacaaggctcaggaccttggtcaccaccccacgcaccaccattttgcgttttgctagagacggtctgggctgatctcgctggtgtccatgttaggattaaaatcccttcatgacggcgaggaaaactgtattatttgctttcagggggtacattaggagtccacgtagtatatgctccgcaaacattcgctgattgaatgagaggcgcgggggcggggcggcggagaggggtctgcggccgccaaggccgccagggttaacccaggtccttcgaagaaggttgggaccgagctgctgccgcgtgtgaaggtgtgtgtcgcggctgggggtgccacaacgggccatggagcccacctcccagagggaggaagtctgtgcacaccagcgacttgggtcgaacactttcagcccatccactgggccaaagctatttaacaattaatgcgttcctgggggaggccgggggaagtacccgccccttgtcgggacgcaaagccaggcgtcaggtccaaaggggctgcagtgcagtccgatttcagcacggaacccagagccgccgccctgaaactttttaagccagtgacagaggagggtcagtccgtcctcctcctgagggtgaagaccattttatgagttcctttcaggacccccaaagcaagaaaagccaaagaaaggtctctttgctctagggggtcgttctcagctggcttctacaccatcttctgctagctgcgtccaccctctctcaaacctctggcttttaggggtctccagtcgctctcgtgctacccccgtttcggggttctatccaggctgggcatccgcccaatggataccaaggagaatgggactcactagggaaggaaggcagagcctggactgcttagaggtggactctgcctatacagaacgtttagtctttaacgaggacatggtatttttgggcggcgttgggggcagaggcggagagggtagcgtaatagactatcacggccttttgaagaagtcatatgtcattgtgaactttttttctctttaaaagcaaagaaaaactttaaaaaaacacaagaaataaatccttttgttttacaagcaggctgtggccaggactttggatattccataagttaacttaaaatcagggaaggataggtgctctatccttcagcagtgctatagctttgcccactcgtgtgatttttttttgtcgtctactagttccttaaaagccaattaaatcaagattttcagcatttcttcccattacatgccttttcttaattaatggcattaaacgtgtttaggcagcaatttttcttttcggtcaaaaagtagaaaaagacatattgagtgtaggggaagagcctttcacgtgcactaaaacaatgcgggcctgaaagtaatggttaagaaagcaatcattcattatttctagttctttatgtgctagttatcaaaagcgaacgaccaggggcgcctgcgcggcttgtgactggcgcaagcagaactcctctgctcttagccgtttcctgctcacctacgaggaccccatcctaccgtaggcttctccacctgtcctcagaatgcattccccatgtctaggaaacctggggtagggactgggggaaggagacattttgcgtctctctggctcccagcacaataagaaatgtcagcctcggcttggcgactgcgagcccgccccgcgcgaagcgagattggggagctcctctagtctggccggagccagggctgagcccgcgcaaagcattctccccagaagtcatcgctgctcttgatttttaaccatatcccaaacatactacggtctaataatttatttttactaccgattatcaaacagaagaagaatttaacacaatctaaatgacagaaatcacgcgacgttatctctgcattgcccccatttaaccccatggggttaatcccggacaagtgagcgtttaactggcccagcagggcgactggcggtgtagtgcagtgtccgggcgtgaagcactggatcgctttagacgcttcatttcaacaaatgatcattttctctcagattcacggggaaactccaatgcaagacctttgttttcttcttagtaatacggtttgtttttttgaccggggtcccaaatcgcccccctccatcccatattacatttgtattcttacactttaatccggaaagagggggttaggggccgagggctgtgggggggggggggctttatctgctcacattatcaaaggtcaatagcctcctaaggctaggcacttatttactacggagccaggaaaatagaggaacagtaaatttgaggggtttttttccatgtatttgaaaagaaaggcatcttccctcctccatcccttacacccccccctccgccccatagaacaagtttcaattcaggaaaggcctgtggcgtaggttggagactttttaactttttacataagcctgtagacctcctctggcaatgtccctcgattcctccagagtgaaaccagccaatcaagcaacgacatcgccaaaacccaaggcctggcaaccagtacttcaggcaggttcgcgtcgacaggggcaaacctccattctaccctgggctgctaagcacagtggctgccctccagctcttcagggatgttgtcggccccccgcccctcccccaaccagccaaagcaaaccttcgccaactcaagtttcccttgcttgcctcccgcgatgaaccgcgcacccacaagtctgggtggggcgtggctgagagcctgagtgactgagtgggccctggtggtgctgcgcgcagcgggatataacgagcgacagaggtcgctgttggaccacttttccacgccagcctagacgccgaggtttgctggagcgtgcgcaggggatcagaccacagggagcgagcgagagggagagagaggtgttgggtctcaggagtgcagtataatttggggaaaggaattaacgtccctgggacggctgcttcccgtcccacccagaggcggagtgtctaagttcaagcagcaggcgcgtcaggtctggcggcctcgccttcttgcgcttcgcccgaggcccagagtcccggaggcgggtgcccagcgcgcggcctgcgcttccctcccggccttaccattggcgccaggatgctgccgcgggaagaacttgctgctggctgcctcttttcggctctcaggagagtccgtgaactcgacctttttgatttcggagtctttggagaagagacattcaacggccgccggctgcacgcctgggccacgcgcgcgcccgccccacgtgcggagagaggcgtcccggaccgcggccgaaaggagccggggacgggaggagggggaggggcgaggcaggccggaggagaaagagggacaaagagcaaagacccagttagaggaaagagctgacggcatccccgtcccccggaccctctggcaacccggggcaggatggcgtactctttctgcgcctccccggttgccggcggttccagccgggaggagtaggctggggggcttcggtacacagcgcgccgctgcttcctagtccaccgccccgccacagggagaggccactggcgatttggttctgatttccttcctgcccaggctggcccctcggggaagcgcccctcgctggggcctcgccgcagggccagtgccctcttgccgccctcacgtggcgcggcctcccgtccgatgacccgggcaggagaagggggttcttacctaattgcacacacgccgacaccagtttgcggcagttggtctccattccccgttatctgcaaaacagaagagaaggaaggctgtaagaagcggcggccgtcgagtgagcagggctcagatgagactacgttacactagctgttaggcgcctactgtgtgctaggcttcaggcgtgtttttccgacctgacagcctctggctgtgcagcagcatctccagcctagcctcgggcccaggacatttatttatcaagaggggatctccctccagagttgccgcaaaagtgcccagaggttagaggactataaagccacagtgtgctggggaggctgtggacctactttcaagaatctcggtgccggggttaagaactcatctgaacgcaatggcagcgggagtgggtgggtggagaggacttttctctttgggaagctgtatgcaaagaccacccttcagtgcttgtccattagttggagctcggtaaacatttgtagaacatcagcgccaacgtgcccctgtcctagacagcagtttccctcggttttctgtaattctgaaacgaacgggctcttggcctagggtgtttcaggagcgagctgagttcgggcctctcatccatcaggagccacttttccatatttagccacactttctcctagagatactaacccggccatttatttacttactacaaataattaccctaaagtatgatttaagatcgcagaggagagacactgggtggactgagcgagactgaggagagcagggcaaacgttcttggagggtttactgcccgccaaggacggagaaatagctctggtataactgctacccagttctccccctttctctcccgggcgagccaaatctttttcacgttttcaaccacaacgcagcgagccaagcatttaacgcgctcccccttctctgccacaggcaagccgggagaggtgggtctcgaggggctccaccgggtgggtagaagagccgcggttgctttaaagacaagaaaagaaggtccagggctccctaggccccttcgatctcagcgcctgcctctctccacgctaaccagggtacgccgacgaccggagggcccacttcgcgcgggtgcggggatcggggtgggagcaagcgttgtcgggttggcggaggcacagaggcggggcagggagctgcgggcctgcctctggcctgagtaccgtttccctgcgtctcggcctctcctgaagggagctgggccctggggagcctctggccaaggtcgctgcctacaggaggggctgcccggcgctgtggcgtggggatccagggtggggacggccaggcggttcccccacccgctagcgagaacgcgggcggggactctgccgattcgatccttgtgggcccgtgggcccagaagtagcagtttggcggctccagatttagtgattctgcagtaaaatcacaggattagtccctgattgagatgtctgttcgtgagatattacaaaattcattatcacagctttctactaactcgatatgaagtaacacagatgggattttattagtccagacttcaaatgtttacttatgataatttcggaggaaatttgcatgtcatcatcatttcgataatcttttttttttatatgtctgaactggctgcattattagctggtagccggagcactgcagatggtaactgcaaatagtttttatttatttattttttttaaagaatgaaatatacaaaagaaaaagattgcgttgcttggtgtaaagtcagtcaattattacacattcttccccccacttccccgtgcttcagtgctgaagaccaaacaaagcaatacaaaacaaatcttcaagaactcatagagctccactctaaggactgaaaagaaggtcaaggcgtgttccttagctcactcctacatgtccttgtgacttggagatttattttgcagtcaaaatgagccttgagacttgcatttttatgcttcatttaatgaccaggcctactagaagaactgagtctaaataactggggaagataattttttaaaaagagacctccaattcccgcctgctgatccttaaacttgccctatcaagacaagtcttctgtgagaaatttggctgccagacttcggaactggcttcaatggctaatctcacaaattgagatgggagacttttcctgatgggaggtagttctcacccccaaagttcatgttctagttggaatgtatatgccaaggactcttgttttggccaacttgggttttatattgtgagcacacaaaaagcactacacggctaacggaggacgaggaaccatggcaaagcaggcaggcaagccctaagaaataaaacaatttgctaaaaaataatttctgatgactaccgcaagactgaaagtgcaggaaaaatacagttcgaataatcccagatcctttcacatttccccccttttcatacactttgttaccccataacaaaatctttaatggaaagtttaaaaataaacagcacaggaacatgtgttttaaatgaactaaattgtgaaattagccagtaaattaatttgtagtaagtaattatttaaggaaattaaaatactgctcagttcagttctgtattttaccatgtgtatgcgttctttacaaccaattaatataagtgctttaggaacatttgaagacaaacacgcttaacttaaggaacaaagcacctaaataatttaagtgtaattttgctgagttaaagtaaaacattccacaaatgaagtggctatttaattttttagggaaagtttggttattgaaatgttgtatgctcatgttacatcaacaaaaatcttcaatttattttgcttatgtgctttgttttcttgatattattggtatttgaattttagatggatttctgccaaaatgatattttgtgtgataaaagcatctttagttttgattgatagactaaaacaaatgcaaggaaatttctttaaatcagattaatttttcataaaaatattttagaatgtatgaattctgatatttacatttataatggtaaaagttttttccgtttagtttagtaagacaatactcacacaaaagagtaaaaaaaaatcacaccaccttatgatagtttgatttctaaattgcttaagaaagtaaagtggttaaactggaaaagaggaacatatttcggaggtttagaatcgaaaatttttttcttaatctccagctggaaaataattctctgcatccatttaaagtgtatctcctgaagtgccagattggagttgactggtgatcaatttaaaggagttacaatccaaagaaatggtgagagcttggcatccaggcctggctcccaggtaattcgcttgggcctgagaggtcactaactgccagttaagatggaatctttttcttttcttttttttcccaatggataacaatgggaagggggctaatcttccagtagctgaaactttgtacccagccctttatcttgagaatgctaatccttggcccgaggatttgttcctgcagtgttggcaccgagatttaagggaagatacctcgttttaaatgccagccacggtctggcttccctctcgacttcagcaccctgtagattgttagtgtctgtggcgggggacgaaaggaacagggctttgcaaggtctgtttgccgactgcgttaccttgggcgaaacttagccccaaaagccacaaatcacctacggtgaagattctccgaagtggaacaaatttccagactcgcattatctcacatccctgcgggatagatggcctccacttaccggctaccgggagagagctgctgtctccgcgtcccactgcttcccggggcgatttccagcgagccgagcctccggctgcacggcaagcgcccgaaagccgggcctgagaggactgcagggctcctgagggtgccaagttccgaaggagtccacgggtgcactggggcctccgaaatctagccgccactggcagtttctttctgctcctctccagctttctcgctcggtctcgcactctctctcctctccctccctctcatccctctctcttccctctgctcctactccgtgtggggagtgacgtgacgtcagcagagattccaccaaactccactgcacagtggcgcgcgggcggccggccgagcccggctgcgcggctggcgatccaggagcgagcacagcgcccgggcgagcgccggggggagcgagcaggggcgacgagaaacgaggcaggggagggaagcagatgccagcgggccgaagagtcgggagccggagccgggagagcgaaaggagaggggacctggcggggcacttaggagccaaccgaggagcaggagcacggactcccactgtggaaaggaggaccagaagggaggatgggatggaagagaagaaaaagcaatctgcgccaacccggcagccctaataaatcaaagggggagcgccagggcagcggggagacagaaacgtacttttggggagcaaatcaggacgggctgggaggaagcgacagggaaagtggcccaagagacggaacaaaggacaatgttcatggggttgtttgggacgaggcgtgtggagtgtgggtgtgagcgtgcgtgtgtgaccttctttcaggcctgcagagttgaggaaagaggtcacagcaaagagggactgcggagggaggaaagtgagagaccggtagagggcgggagtggaggtgggcgcggtggggatgggagaggatgagtgaagagaaatctagaagaatggagtgagctagtgggagagggtgggagggccacagccgggagcgaacgagctaggcttgtcagctggggaaggccgggacgctgggcccagcttagctgggacaccgcgcccgaggtcaaggcgggtggaccaggcatgctgagagtgtcggcgcacaggtgggcacggccacgcactgacccagtgttcacgaagggtttgcactggacaaggctcagacgctcatagagtctagaatttcctctgctgtacctacattcaacaagttcaccctgggtcacggatatctcattttttaaaatgacgaggttaaggttcctggcgaggatggtattaaattgcacgggatagaagtgggggtgggggagagagtttccctcaagtccacatttgctcctgcaaagcaaagagtatgtgaaattacagggcatattctcactcgaaaagtgtgccttacttctgaaccctgattttctgatttcttgacttgagcaaagatgtgtattttggtagtgagcagaatattttggctctgtcctgcctctgagtggaaggactataaatataattcgcctggaggaccaggtgtgaaggcttctgccaggcatatgggacaatgttttttcaatctcaagggcatcctgttaatgtatgtttttggaaagtgccggaacacagccattgctcctggattcggattttcccaccaatattaattcctgcttgagagcaaaactcaggcccgctattaaaaagacatctctttggtccctaattgagaataaagttccctctaaaagttgtattgctcttcctaaatcaatataccaatactcgcaattttagaaatatatagtgactcgggagaatgtgcataaaatagatacgtttaaaaaagcttggcgcttaaaactaaccctagtcactatataggtgctgggctttccctacttttgggggctgtctggaacatgttatgtgttttcttgaattactccgtgttttgaattcatttgagttagcagtaaaaacaggcaaacaaacttgctcaatttgttttgagtgctaaatcccttcactttgaaatagctaacagtcgacagatggactcattttatggaaagggttagcctcttcagccacgaagaaaactgattagagatctacattttaagccatttctaacctccacgtaacatccgtgaaaactcaaactttctctctttacccagtggaaactcaaagcagtgttatttaaggggagagaaatgagggggaaaatgcccacgtgctgtttaattgtatttcctctctgactctgagaatttctatttctggtttttgaaatctcgccgaggcaagaaaatcaaatttcttcaacaagtcccacaactgaactctagttacaggacaccggaaagtgcagtccgagaaagacatcttcacctctgcccatcgacgatttttgcagcctccccattcctctgagtaatgggctaataatcctccctttttttcttttcattttgtagagattaagaggcgctcgtagcagaacggccttgccttcagctggtggcgaggataggcaatctcatggaaaagttggaagagaatgagaaaaccaaagacagaaagattcagagatccgcggagagacacagggagagggaagggagttgcgctgaaaagacgcaaagatacgcgcgtgcaactccctcccctttcaggtttcagaggtttgcaaaccagggctgagaggaaggggctcgggaagctcacgttcctctcgccccccttctgtctggagtctcgcccgccagaggctggttaaccccagtcccggccgccgcagacactgcgctgagcttttgggtcctcgccttgcccagcgccagtgcagctgaagtgagcagctggtgggaaatgcaaatggctcctggagaaatagaagatacagaatgattctcattccctcctcgagtgtgtggaaggagctggacatacgtttcacgctcctaatccttcttttacatttttagtcatactcctattaaacaactaattaatgcccagaatcaccagggaatacattaggcatgcaatcgtagaagcagggtgctggggggctacaaaccaccgagctgatttaagacgtggatttcaggtttttcccttgtcaaagcagtaaaggaagagcgggccttggcgactgtatttagattccgattacttcaaattagaagggggtggagggagcgtccaagcaaagcaagcaattctctgccctgcagatgtaaacaagattgtagcatcaaaggtactagctcctttagggctagatcgcctggactgggagcctggggaaggggagacactaaccttacgtatctgtgaatttcaaggatgttacatttttacataaacaactccagtgcggattctctggaatggggggagtaatacccccattctagaatattaaaacattttccccccaaagcgtatatcctttttatttcctcaaaattttgaactatgtctaaagataatagtcttccagtaaactggagcattggaccatttccttcaccctttcctaccgacattttgatgatctgattttaatgtgtggggggcacagggaattaaatacagcccataaaactaagcttagatgaaacagtgctggctaagtgggttcagataatttttaatgagaatctcaattacactcctccccccaatatgttgagacaagtgacagaaccgttagaatggtaatcaaattggaaagctcagggagaacaacaatttcgtgatcaaattggggcaaaaccgtggacaaatgtggggtgacctccgccaactccctgtcacccaagagtcaggatttgggaaaggtacagtattatttcagagcccgctgtgacgggctgtgtgctaccatttactttcttcactctggattatgatctcaaccctggcaagcaatttccccagctccttatctgacaacaagcgagtatgtaaataccaatggctagcgatgtttaactgcctcaaacattattgatttgttggctgttctaaattgtcttcctagtccaggtcttgtttccgaattgtctattctagaggtttgatccatgcctccgatgctacaatacaataattgtttttttaaaaaaggcatttaagatgaaccaattgatttgcatataaattaaaattactatgcgttgccgattccggtgttttataatcatttcgaaattagtacttaaccacttgagctaaaagaatatataaatgcctgtattgactcactaatgaattacccaattaaaacgtccgggcaatgctgggcgctggaaagattgttaaatcaagacatattacaggagggatatgaagattagaaaggtaacagaccaatatctcgcactcaaaacggagtttccggtgattcccagctttaattttggagcaggggtctttctcctctgctgttaaaaagattttgtgcttgtttgtgagtgagtgcattcaagtggaaggaacgctcccacggctacggtggctcaggccctttgctcggaccgggaccttacagttctaacccaggagcgttaaactctggaagactccgggccagccctggaggtgcgtggccccgcaagtcgccaggccaagcttgctttttctgtctgcccctccggcaggctgggcgcgctatggcagtgagctttccgcgcaaacggagagctggaaccaaagctgacatttaatagatatgctaactgagcacttaccttcgtcctgagaataggaataaaaggtagctcttcttaagagaggcggtgcaaaggcacgctataggagttcagaaaaggctggcggcgggaaatctgtagcctgggggctagtcaacatcccctttcatttcaagcacttattgatttgctgttgtcatctttggcgacgcagaaggacacttgaaagaatttctgatggggctctgatctgagaaaggaggtgacctgcccaggctcccaccaaattcttaattaccacatcaactgcttttttttatcccccacccgacctccttccttttgcttattcttaactttttaattattcagaaactcccttacctctcagtggcttcccttctgcagcagttttctattcgaaccttttccccgcctttccgtggtagggcctgtatattgatccctctgacctttggcacatctgggccctctgaaatctctcaatcttttcagatttgaggatggcaggctccaccctctccactgtgtgcacacactcagagatatgaaaacttacacagactgccttcaaacccagggtatctaacagatgttccctttccagttcgtctcttgatctgaaatgcctgcctgattccaacttggataccactctttcttgcccttcctttttcaaagcagtttggacatgtgtgcaagtgagcccagaacagctccacccatattctttaccaaactgtaaataaaagaagaactaatgaagtagattggcatatagattgcatcaagagcccgaatccccagtttctggattccccattcaactctggctgtcatctacattgacagagtcattctaagcagaggcccagagaaacctgcattgtgggacaacaggtaaagccacagtaaaaagtggaataattttaaagtcattttattagaatgtaaattgtatttctgggttttgttcgtaaccacctagttttaatatatacagagttagacaggaaaaaataggtcaacacagttattggtactagagaagacaaattccatgggctcctcagtgaaaagaagatccccaaagtctataatttttgatcatttaatttcatttataattgtgggaatgaataagacaccaactgctttatgtatttcatttacatcaaccaatttgtgtttccatcaaaagcagttatacagaatttcttttaacttctggtagcaagttcagaaaatgaagcttacagccaccctgaactggatacatctcttgagctgaccatttctgtaagtgcaggaatataatattgttcttctatggtctttttgcactcttttagggtttgcaagtccttatcaggtctgacatcactgtttgggtctacattcattacaagcaaatttgattactatgctgattttaaaacagcctatttggccagcataatcttagttttcaaattataaaaaccttttaatatacgaagttcccagtttttacctcctctagctccttgctcattcaaaacttctattttaattggtgtaagtaataataatttgtattactatttgtactccttttacttttttggagattgggctggattccagagagaacaccagcatcaccaccaccacaaacaacaaaatctaaaagtaaagcccttatttgcatgataattggtacttggaatgcttctgacttactcaatgccaccttataaaggtaccttgtaaactttcttggaatttctagcaagagcttgtagtaactggaacaactctctgggaagatatcctctttgatgggctttcagtttctggaggaatagattgagagcaattagggagggaggggacattggaaattggcagctacgtcagctgaaacaagcctgggttcagtaaggtgactgatgttgtggttgattccctaccccgagtttctctttaattggggcactgactcttcccactttgggatcccaaggcactcggtgtgtatgcagattcctcccttgtggtcttcaccatgtggtttcgtagcaggtct

SEQ ID NO: 468 - DNA, 14285 bp, Homo sapiens
  source 1..14285: mol_type = genomic DNA
ccaagcccctctacagattctctgccacaaagacccccttccctcccctgagaatttctcccgtgtccctacatccagtgcagagggtggtcccagcactgggtggtatgccaactatgactctccatctcccaggagacacagccttcatcatcctgcgtaagcggccactcatctttattcactggtaccaccacagcacagtgctcgtgtacacaagctttggatacaagaacaaagtgcctgcaggaggctggttcgtcaccatgaactttggtgttcatgccatcatgtacacctactacactctgaaggctgccaacgtgaagccccccaagatgctgcccatgctcatcaccagcctgcagatcttgcagatgtttgtaggagccatcgtcagcatcctcacgtacatctggaggcaggatcagggatgccacaccacgatggaacacttattctggtccttcatcttgtatatgacctatttcatcctctttgcccacttcttctgccagacctacatcaggcccaaggtcaaagccaagaccaagagccagtgaaggtttggagagaacaatgaagctccaggctctctcttctccagggcaccaagaggctgggcttagttttgggagaatgattaggttgccttacctgcatggtttccccagaggatgtgtgccccaaggtggctggaatttttgacagacaagaagggtgaccttgggatgggggtgtggtctgttactttaatgtttctgtttttaatgtgaaggccaagcaggccctgggatgggagtggggcggaggagggtcctaagagctgattatttaatttctatccagaaatctttcttcttcttgctctgtttttttaaattaaagatttcaacaaaattttgagagttgggggatttggggggaaagagggctgctgtgatggcaggaggctgctaccaaggggatgatctgcaggtgggacgcctgagggtgtgtggaagggtgagaggcacacacacagacactgaaagaatcctaggcctggtaggcacttaacaaatgtctgttacagaccagaattttattgctgttagagacccaagcccctcataggaacagtgagaaacaggtgcagaaaggcggagtaactttatctaaagtcataggctccctgaatagcagagctgacacctacaaggaagcgttggagaccagatctaccagctagcctccctgagaccacgaggtggcgccgcagcaccggctgtggccgatgccagccaggtagccggtttcccacgtcccccgcacgcacgcacctctttgctgcaggaatcccgggctgccccgacctggagtagggggggtggtgagtgggactgagtccctagaagcctggaccctcacttcgttcctgtacatccagctcgcctgtagacagtgggggaggatgaagggaagaggactcaagcgcaactttgaatcatcacgccttcgacagtccgcgcacgtttatttcatttatctttgaaaacgagggaggggaagcctggagaaggcgggatgggccaagggtgagttggcccccggggagctggtccctgttcctggctttagtcccaggggcgcggtctgtgtgtagggcctagtccacccctcagggctgggaggggaaggccctctcctgagccggtgccccccagctgcccaaacacccctttcagaccctggggcgggagcaagccagtcaaaatgaccccagtccgcggaggctgtgaatcgttgcccccgccctcggggatgatctacgggcggggccgctcatacgggcctttccacggcgtactggcacggactaaggttggctgccgggggcggcccgtgcacagcggggtagctgaaggaggcgtgctgtttggctttgagccgcaggctggccaggctcgagttacacgggtcccgatagacgtagggggaagaggcggcagccgcggcggcggcggcggccgaggcataagggcaggacacggccccggaggacacggcggccggagccagcccgggggggcccccgcccaggccctgcagggccccaggccctggcacggtgcccggggcagccgcggcggagggcaccatggaggcggcgatggagctgggtggcgagaagacgggctgcgaagccagaggccccacgttgaccgagttgaaggcgaatggaaaggtcttggcggcgagcggcggggcaagagccttgggcggccagttgccgtacgagtagccggggtacacctcctcgtagggcggcaccagccccccgagcggcgccgcgaagctgcctttgcatagctcggcctgctggctgcgctcgcgcttccgccatttggcgcgccggttcttgaaccacacctgcgggcacgggagaaaggcggtcagggcccggggccgggtcccagcggctgaagggcgggccaccccgacggggcttccagccggggccctgcggtcaataaacgagatgaggtggctagagacggggtgggagggaaggagcgcacggagtccggggtcggagaacagaaggcgcgggcggctggaccgagtcatcggcgccagggtctggcgggacagtaggatggggttgaggaggggtggtgaggggaaggagagacggtgtcagggccgaagaagcgcgcggtccgagtagtagggagcagtgggagcagaggctggaggttggcgggcaagagaccgcgtggggctgcggccgggagccagggtccggggtccggggtccgagggagggggcaggtggggtggaaccgctggcctccgggtcgcaggctgagcgcggagggcccgcgcgggtgcgagtcgcgggtctggagagcatacccgcacgcgggcctcggtgaggttggtccacacggcgatctcctcgcgcgtgctcatgtcggggtagcggttcctctggaaggtcgcctctagctcctgtagctgctggctggtgaagtgcgtgcgctgccgccgctgcttctttttcagcgaaccgtcctctggggagccgccgggcagcgaagccgaggccttttctgagtctgggggccagggtgggggcaggtcacagagcgcccaagccagcgcatattctccggctcggggacctcctaagccactcgctggctcccaccggggctgcccagccggggtcccacccgcactggggatgaagctgttatgtcctgcacccccggaagggggcgcgcttaccgctgtgctcctggcccttgcagccgtgctctgggagctgggggtgcggagtgccagcgtctgacagcgacagggcagggctccgggcctctgcctcgctgagcaggccgaactccatggagggagggctctggaggcgagagaagacacagaccagggtaatgggggtaaaatctccggcttagctaggtcccagcagcgtttcctcgtaaattccctggcgcctttctcaaccccagccgtaaagctggggctgcgtggggctccttaggatagaatcgggaaatagcatcctaaggacgcagaggtgcatgctgagaggttctctgcatagatatataaactagacttcgtttcgtttactgctgggaactagaactgtgccaggtatacagttggggttcaatatttattgaattaataaaaatgtagactataggccgggcgcagtggctcacgcctgtaatcccagcactttgggaggccaaggcgggtggatcacctgaggtcaggagttcgagaccagcctggccaacatggtaaaatcccgtccctactaaaaatacaaaaattgctgggcggggtggcacgtgcctgtaatctcagctactcgggaggctgaggcaggagaatcgcttgaacctgggaggcggaggttgcagcgagccgagatggtgctactgcactccagcctgggtgacagagcaagatgctgtctcaaaaaacaacaacaacaaaatctacactatagcacgctacataccctatactacatctgcaaaaacttaaaatccttctcacctgaatgcttagtatccccctatactcatacatggtcctcagccaatcatacctgagacacagaccagatgtctgttacccattctccttaggacagattgtattttgaaccagacctgatatttctcccttaagaataatgtatacttactgtgagcctttacctcattctctctcccctcacaagaatacctcaagtatgatcatcctttttctgctgaggaaaccgtaacttgaaggaacttgatgaggctcacagagcttgtaagcagtgggattgagatctgaactaggtctgtgagactcctaatgctttttctttgtttgctttttatttttcttttattattattttatttttctgatccagtcaactcagaacgcttgttttctcacactgtgctttctggggccttccctcgagattcgctcagggactcagctgcggttctagcctggccttgcttgggtcggcttcagctagggcagcgctgctttggtctgtttcgtttacgacttctttcttttttttttttccttctttttttttttttttttgagatggagtctcgctttgttgcccaggctggagtgcagtggtatgatctcggctcactgcaacctccacctccagggttcaagctattctcctgcctcagcctcccatgtagctgggactacaggcacgtgcccccacgcctggctaatttttgtatttttagtagagacggggtttcaccatgttggctaggctggtctcgaactcctcatcgcaggtgatctgcctgcctcggcctcccaaagtgctggaattacaggtgtgagccaccatgcccagcctgttttgtttattatttctgaagagatttcatttgaaagaaggtaacaagatcaaacacaagtataaaaaccactgggtgcttgggccgggcctggtctcatgcctgcaccgacacacactgcatcccaccagtgactgctccactcatggacagcctctaccaagcctgctccaggccataggcaggagcttcattagaccaccttcctactcatacttcctttcccaaacttagcctcacattgcccaggagcctcccagggtccttctccaagtttcccccgcagggtccccttttctgcctgctctcccaggacccctctgctgcgaggaagggaaatgggcaatactggggctcaagactctgggtgccttttggttggaggagaacagaaggaggctagggacagagggaaggggtagagagctgagtgggaggggcctctctgcctctctcaccccttccccattaacaggggcttaatgcaggctgcacaggatggcattaatgtggtggattagcctagattgagatgtgtgtcacttggctgctctggatttattaggagcctttctcagggaggtgcagatgggcagcagcctgtatttgcacatggtaatgcccccttcaacagctcagagatcacagctgtgcccccactccccaccccacctctcaagccaggttgggagtggaaccgaggtcaaggcaggaggttgagaaagagtccctgctctttccacaggcagaggggtctagatcttggaccttttattgggtgtgaagagacagggctggagggaacccaggacaggagaaaagtcaggccagaactggaggtgtgctcagcttacttccccttccaggtcgggtcaggtcagggggtttggagctggaaaactttggccaacaatgctctgatggaagggagatgtccctgagaaggaactatggtagccttggctgggaagatgagggaggaagggttagaactgagagttggaaaaaggggtgctctgaagtctccccttacttcataccccttacttcatacccaagatgcccttgaaatgcaaatcatccccctgacttttccagaggccatggaagcaacatggagctgggaaaaaacccagagaggggtttacctgtgggaaaagcagtcccacccttgccacctagccttccagtcagctttggctcccgacttgcagttttccaaattaccctgtccccggcattccatacctgcatcttgctttcactttatttcagcagagggaggcagggtgagaagggatatgggcgaggaaaagccgaggccagaaagccgagttcaggctgcgtgttcccagagacagacagacacatgtgcagacacacacaggcccccactcagacataataagcacttggacttggagctaggggcacacaaacacacactctcccacacatgcgctgccacatccaggcagacagacacgtaccgtcacacagtctcctctctgtgacagggacagctgccggggctgttttggagctagccattattacccttcccccaccccccacccccccaccgcctccctggcccctctgaacctcagctctcagtcccaggagctaaggactctgtgtgggggaggagcaggccaaggggccaggggagtgttctgcactggatgctgctgagtgaggagaaggcatgagaatgctggagctagaggatggggtggggaggaggggcagaaagtgcccaggcccctctcaggaaagtcatctggtatagcccaaagaaattaggtttagagtcagcagatctagattcacgtcctggctgtacaacttactagctgtgtgtcctcggcaagttactttacctctctgagcacatttcttcatctccgaaaggaagttcatgatcccttccctacttgccttcagtgttgttataaggtttagataaaaacataaacatgtaaatatgagtagggataaaactctacctgagtagttttttttcctcactcattaaacaaatgtttatttagcacattctatgagctgggcattgagttaggcactgagggtggagtggtggctaagatctcatccctgtgtctgcccttccttgagtgagtcatctgcccagactctgtatcctccagtgaagtgtttccctggtgaatgaaggtgagtacgctgcattactgagagataggcaacacatgctgtgaacactctgtcctgagcataggtgacccagtcaacaaggtaacagcaaaatgggcagagtaacccaagctgggagccactttggggacaagggactggtagaggaaagaatgaagcctttaggctcttgcatgggctagtaacagcagagagaggagccacagctgagaagggacctgaccgtgaaactgaagagagaaggaaagaacagtaaagccaggcaggcaatagagagatggaagggtgggggcatagacctctagccgactcacgtccgggtgggctggtcaggcaaaggctgggggcgccaagctgttgtctgagctggagacaggctggctgaagattaagctcccccaaactgctggaggtcaggaagctagggagttgggactgaggccagggacttcgcctcactcagtggatagggaagaacaagcagtaggtctggaagccgcaggattggttgatgctagtaagaaatgcccaggcagggacagagagagtcagaagataacagtgatggtgagtccagctctggaagggggctgccggccccacccctagactttttgccacaccctgctagggatgtgagggatgtgtggcccagtcccactggtatcagggtggcaatcccaggcccagggagtacagagggcctacaggtatgctctgattctgtagtacaggctggaattacaggaagcctggtcatggactgcagcaagaatgaaatatccaggacatatgaaggtggagagcagatcccaggccagggaggccacagtggggaggccatggtttccaagagacacaaccccatggcaataagtcagctgtcatgtggacccacttaagtcctgaagccagagaggtagaccagggacatagtgagagcccacaatcggttgcaataataatgcctgaggctggaggcataacctggaactcaaataggagaaaacctttctcattcaggggctaaatggagagatgagaggagctggagttgtgatgttttcatcttataaacatgaaactgaagtgaggtccttaagtggacatggctgcatgttcattagggacgctgagcacccagactctatggtttgctgaactgcagtgtgcaaatgggagcaaatcgagacacatttgcagcaaagatttgaagcactcaagttattaagggacgattcggggatcagagaaatgactccacagtcttcctgctcttccttgcttccttccttcagcaagtattaggtgttaagagggatcccaagaacagtaaggcagagaccctatcttgtaggagtctgcagtgtagggaggcaaacagagcacaggatggaaagatggaccgcatgggtctgactcccagactgtgggagatcagagagagggaagcccatggaaggtggtaccgagtgttgggagctcagagaatataggcacgtgactgaattgggagttcaagaggaagagaaggggtatggcattctaaataatcagcagtgttgggaataagctggcaggctgggagggcagtggtgagcctaggttagtcagagtctcagtgtaggccacgggagatctgcagagagaaacgagtcaaaccgagggggcctccaatgggggacaaggggcagtggttcagatttgacaaagtctaggctacagtatgtccagctttttcatcaaaaaccgctaagattcacactgagcaacagccctgaataaagaaaaaaaccctaagaccagtcaaaaacaacatctactagaaaacagaagcatgacctgaaacagctgccactagtatgaaattgttttgaggtcaccagctttatgttaaaaatgcaaacaaatttttcgttctattccatactttagtcatggattataaaatattttaatataaaaataaagctttttttaatataaaaccccccaatcttcaagtgatatcaccacaccaggaagatgggccctgtttagactgtgtgtcatgcctcctccactcccgtactgccctcctcccccgcccaccccactatgagaagcaatgcaccaagcagtaggggtcactggaggcttgtatccaggggtgtgacaaaaaacagcatctttgtgacctttatttgaccatggtgagcataaagggttgggcagggaagaaataggaaaggagaaactattaactgaaaggtgtaaaaaaggccccggggcaggacaatgggaaaggagagatagagttttgaaagttattcctctctgtcttcccccaactcttaccccactgatgatcttttccttttcctccccatcattcttttcatgagtccctggcagtggccatggacaccctagacaccccaaagctcaggacctaatggatccttcaggttagtctaggaggcatcatttagtgtgaatggagaagaaaagattctactggccccatccttcagtcaccacaagtcagctctagcctgctgcgtttgccctcccgtcctgaacctgagtcctgggccaatgttcccatccctgagcaggaggcaggcagagatatttggcctggtagacaggctgagcatttggggagctccccagagttctcagacagcggcaggggtagtggccagcatctgaagtccacgatagggtggcccgtctgtcattaagatccctcctatggctgcatcagggatgagattaggctgctctaagtctcagccccacttttccaaacaaagattctgcagcttgggcataataatagcagtgcttcttatttatatgatgctcctccatttgcagagggccttcacagacataatttcatttaactcgcacaactgccctgcatggctggagtgcctatccccattacacctctaagaaggcaggatgcaaggttacacagtttgaagagatttgaagagattcaaaccatctagttctgctctttccatgcctcactccctccaccctgtagccatttgtgactctgacatgtgctgatccttccaaaccctgaaggattccatttctacttcctgcctctatcatctctctggaaatgagctctggaagtatgctgcccactgtgtgccaaagaacatttttctattcatcctgagcttgcatcactccagttctaaaaggccccctcatctccagtttcaagatttggggagcaagcaattcttctgcatatctaggtcttttattatgctgtagatttccatcctgtctcaccttccagaggactaaactttgaaatttgccctcaccagcaacccctggctccccattctgccaatcattctctgaccctactctaggcccatgacattcttcctaagagccagtgaccaggcatgcgttcagttacaaggctttatgcaagggtgggaaaaggttctgtcttttgtttccaatcaccttcattatgataccacctctttggcctttttggcaaaagccaactttgagctaaagtcttcagggaaccatctgtaatgctttccctgttcctttcctgacacagagtccttcatttcacctataatttcagtgattttatgggagcacagcaatgggagcacaagcccctgaaaagtgtatcagaatgtgatggggataattgtggtgtgtctttatattgatcaaaatagggcaaatgaaaaacaaaagttgagaatcctagccagtaataagcaaactttagaactgaggaatggacatgggagtatggggaatacgtattgtatgtcactcacaggtgaagggtaagaaaggttgaaaccactgtttagattactcattgctaaatacaatgccttgcacttgtccttgtgaaaactcagtccccagctgggctatcttgctcacttatatggactcgttctccctgttctgtcctcttcagcataattgagctgtggttagaattggggtcagggtggatggtcactgtatgggcccagcagagtcagggctgtatcccagctgcagggaaagtaaacccggctgttaggtagggccaagatatccttcccaaccagactgagagggccagatagccccctgttggactccagagtctggattccatgagcctccttcccacctccgctcagccaccagggtggtgttgggactggtagggctgaggaagaaaaagggaaacaggaccacaggatttgctttgctaatggggctgtagttttctcttctggcctgggctcctgcccactgtagggaaggagccattggtcgcctgatactccagcaaggagtctggggggtgtctggttaattgtattggaattagggggcaactgaggctgccaggggcttgtacccagctccttcctgttttcccattgccttttgtcacctattccttcctttcctggtcttgattcccactagcaggctcctcattggccttctgtcctcaaatttggattctggaagtacagagtgatgctctgatctattctgaattgaagggggcatgtgtcccagcccacctcaccccaaggccaggttgtagcctttactctcgctccctgctcacagcttcgcagcccgaaggagctgaaacaagtttgcaaagtgtgagctgggatttgaggtgacccaccgcagccgaccccatcgcacacgcagcagctgggcaggcgctgctgggtagacggacatgccacccagccagggacattctgtccgccactgccagacacaactcccgctccggagagacccacttcgctacccggacattctgtccgctccgagccccatgcaccgcggacattctgtccgattctgaggcggcctcaagtcaggacccttctgggcccagacaccccaagccagatccactatacccgccgcctggtcactctgatccgcacagcggccatctgactcagtcgcggccgggctctcacaacacagctcctattccaactgcggagcagctgggaagagaagcgtgtgcgaccaggcgcaccccggctcccagccccaggagtctgagcctaggccgaggggcatcgggcgccgtcaactgcccccacactgggggccgccccgccagctcccccgctggccagggcctctgtaacccctttcgctccctggccgcctgccccgtgccctgggattccagggcgctttctggtaatggtttccagactccctactccctgcctcgcgaagcccctatcctggtttcaagtctccggcttcgttccggatcctctgagtctcccccttccctatcccctggttcttaccctgagtttcccttttcccaagtcctggccccaggtctgcagtccgccctcccattctcgacctgttcccaaggcaccggagttcagctgccccaggtctcgttttagggattccaaggtccagcaatagctcctcggccccatgagcccctgtccttagaatggtcaaacactcacagtgcgtcctgcaacaggcagactcccagtagcggcggctgcggcggcgatctagagggcaggcaggggccaggggccgggcacccggccggagtgggggccgcccccctgctcccgggccgcctctccgctcgggcgctcctggactctcggagggagtgagcctcaccgcgtactgccacccccagccggcgcccattcactttatggcagaccagggcgcccccagcccgccgcggcgagccgcgcgcgtcaggccccgcccctttccagctgccctgctggggctccgccctttccagctgtggatctccaggccccgcctttgagggaggggtctggccggcgagacgccaagaaccccgccctctggccaatcagaagcgctcttcagcaactcggccgcgcccctccccacgtggcagagaccgcgctccggctaggacgcttaggcagagccaagtgggcgagagtagagtggtcccggtagccacgggtaaaagggatcggctggcagcgaagtgggttgggccgctaccccgaggaaagtggatcggcgccaggtgggaaggcgcacggggccgccgggtctcagcgctcagacttctctgccactcaagtttcgccgattttctccacttgtcgctgtccgtctctcctcccttttgtctctgttccaatcctcccacgtctcgcctttctttcctcttctttctcctcagccgcttcgctcctgctgtttaccattctccttcctctgccactttaaaagactcatttctctttctctctgctcctctttcctcatatctttcctcttcttcatttcccccttcttctccaaggaaggtgacttcgtggagacagcagggtttggaatgatacaaaccaaagtagtattccaacgctgccacgaactgcaccatcactgagtgaacttggacgagtaactatcatctccctccccgcgcaaaacaattaagaggaggttcctgctggatctcagggcttgggctgggcactccaaaggcattgcctttcagtctgtacccttgtcttgcttaggctgtgctctccctccttcagcagggctggtttcccgctggtggtaccaggttaagtcctgtgggcaaggtgtggccttggtgcctgctggttaggaatttgcaagggacaggacagatgaccaaggaacatcctggcagactgtgacttcggccctctctgacttaggcctcaatttccaggaaacaggctccttctcttctcccagttaggctatgttgcttgggtgctccgaagagcctaagcccaggccaaacactgtggctcatgcctgtaatcccagcactttgggaggccgaggcgggcggatcacaaggtcaggagattgagaccaccctggctaacacggtgaaaccccatctctactaaaaaatacaaaaaattagccgggcttggtggcgggtgcctgtagtctcagctactggggaggctgaggaagaagaatggcgtgaacccaggaggcagagcttgcagtgagctgagatcgcgccactgcactccagactgggcgacagagcaagactctgtctcaaaaaaaaaaaaaaaaaagagcctaagcccagtcacacaatatgcc

SEQ ID NO: 469 - DNA, 64592 bp, Homo sapiens
  source 1..64592: mol_type = genomic DNA
cccacgatgcctccgtgtctgccctgggagacgggctcctgtgtaacggcccccagggcctctgactgcttccggcaagggggtgcagagggagcgggaacacgggcgccgcagagcctagagcgtcggcgagcttctcggaaagagttggtgccaccgtcctgacaccaaccctctgggactgtggtggtcccgtcctccaggatgtggtcttcggcctaaatcagtggccccacagaggaccgcatgggtctggggaccaaggggtagaggcaggagtggccgcccactcaccagctcccagtgacccactgacaacctgtgcttcctttccctgcaactcttaagctgtgagggctcagaggtcctaaaacccagccacctgggacagagtaaggcactgccccgctcgatggctgtgggtcacccggccggggccactcctgttccagcggaccagcaggcagagcaccctctaccgggccggggcagggagggtaaagcccagcaagagcgagaagactaggacttggaccccagggtgaacgcctgggtcccaccagcaggagaggcgaaggccaggcacagtggctcacgcctgtaatcccagaactttgggaggccaaggcagggaggatcacttgaggccaggagttcgagaccggcctggccaacacggtgaaaccccatctctactaaaaatatgaaaattagctgggtgcacacctgtagtcccagctactcgggaggctgaggcagtagaatcatttgaacatgggaggtggagactgcagtgagccgagatcatgacactgcactccagcctgggtgacaaagcaagactctgcctgaaaaaaaaaaaaaaaaaaaaaagagtatcggctgagcctggaccagtggctactgcaggctggggtggccccgcttccctcctcccctaagtcttcccagaaactgccaccagtcggaagcctggagaagcccatccagatggaatccccggagtgtgatgggcatggggccgagacatggcagactgtggtggaggccctcatactaggcccactgcctgtggccccttctctggagggctgcccggccagcagcaaccaactgacccggggccatgtggcaccctccccggaggccaaggggccacagccagtgactgatatgggagcataccacaccccgcctcagataaggaaacgtgagccccttatagtgcgaagggtggggctgggagactggtcagcacctgaccagcagcaggtcccagggggcccggcctcagtgtggccaccaccctgccccacactgaatccctctgcccagggtctctcagctgccctcctgcgagcacctggtctctgctgcacacagacgtacgtccctgactggccatagtggctgagctcagagcctggagcctggggctgcaatgtccaccctgtccctgacacacacctgaccccaagacacaaggccggaggcacgggaaggttggaattgcttttattgggggcggataccgcaaggccccgcccacggtcaggttagtgttctgcccttgcagaggcgccagcagcctgacacctccacctgccacccgcccggggttagtggaacatgcaaagctcagagggtggaggcaggggtggtcgctgctgagaccagggctgggtgcaacaggagggtcagcacagagcctggctggtgtccctgggcccaaagggggctggggctccatgggagagagacgggcaggcggcaccccagtgtggggctccacaagctggaggggcccctggacccaccaggaggacaggtctgcagttcccagccatgccggctggaacgtccgcctccccactgggtctgggtcctcggggcctggggttagaggccgacatggaaggcacttactaggggaacagaggctggaggctgacgccggaggccaggggtctcaggagtgagtgtggggggtgagctggaaagcacagatcagacagcactgtgggggctgggcccgagggcctcgtcttcccatggggaaggggcttctctgggtagactgggagagaggctgactggggccccccgtccccagcaaggcccaccgtgcaggccagtgctagaaacaccagggccctctacagacagggttgggcccagctgccctgtgcagctaggactggcaggcgggctaccctgggaagacaggagggtgggctggggcccagcttgggaccctccaaggcacctggctgtgtgagtggcaggtagaagggagtgaggagacccgagggggtgaggcggccagcagggctgggccagccctgtcccccaagatacaggctgtctggacagcagatatatattaatatattagtctggtctttttggttaaactttaggcaccacttgggaggaagacacctttaagcgttgaaaacggcccccgcgcctcggtgggagccgggctgggccgcatgcagagcggggtgggcgcaggcagcctcaggccacggcagactcagggccccccagggaggccgaggaccccgaggcgtagcggcggccgtagcccgaggaggagtaggaggatgaagagaaggtcatggagaagccggagccggtggcgtcaaagctgccgcggcgggagccggcccgggagccggtgcgcgagccggtgcgggagccagcggtagagccggagccgctgacgctgtaggggctgtagtagcccttggtggactgcgcggcagcctccagcagccgcagccccgtgccctcctccaccatgctgcggtccagcgcgtccttataggagatcttgagcttggtcttagggcaggtgaggtacttggagtaggcgcccacgtcacgcagcttctgtgcggtgcgggcgtccaccgtgccgcgctgcagggcctcgtccaggggcacgcggcccggcgtgtcgggctcgatcaagccgccggtcaggtactgcacctccaggaagcgctggccggcctcgtagtagagccagcccttcttcagggcctgggcggccgacatcttggtcttggtgcgtgggtcctcgaagccgcagaaggccttctgggccaggttgatgcggtccaccatgatcttgtccaccaggcccttgttgacggcgtcggtgacagggaagcgctcaccggtgctggggtcgatgatgcccccggtgcaggcctgcgcctccagcagccgctgccccgtgatgttatccaccaggttccggtgcatggcctcggtgatggacaccttctccagcgtctccgtgtccaggatgccagccacggggcccgtctcctcagtggggtctgaccaggaggccagctgggtcctggagacggcggggctgatggggtaggaggaggaggatcccaccgaggaggaacgggagcggaaaccaccggcgttgcccgagagcatgtcggcgaactcggtgatggagagcgtgccggcgcggtactggtccagtgccgagcggtcgatgaggttcttggcgatggcatcatcgatgtcgtactggcgcccggagcggcggtcgatgatcatggacttgaccacgccgtccgaggaggagatggtgatctcctcccactcgcactcctgctcggacagctccaggtacgtctggtggtcaatcaggcccttgcggtaggcctcgtacactgacatctccttgcccgtctcggggtccacgatgaccactcggcgcttgcgcacggaggacttggaggacgtcttccgctcccgcttcttctccttcagcggcaagagacacaggcccgtctgggggtcagtgatacaacgctccatcagctgcaggtaggtgaggttctcctccgtgttagggtcaaagaagcccttggtgtcgtccgaggggtcggtcaggatctcgttcatctcctcatcgaagaggccgcgcttgtaggccacctccacgggcagccggtggctctcctcagggtcgatgatgccgcccgtggcgatctgggcctccagcaggcggatgccatggtccttcaggatcaggcccttcttcatggcctggaagagggagatgagcttcccagagtaggggtccttgtacccagtgacggcgcgctcggccgacagcagcttgtccttgaactcggggcccacaatgcccatacgcacagcctcctccaccgtcagcttcagtcccttgatggggtcgatgacgtaaccggtggccgcctgcgcctccaggagctcaaaggctgtgccggggcggatgatgcccttcttcatggcctggtacaccgagagccgttccttggtggcgtccacgaagacaccagcgatgcagctggtgccttccaggaacttctgcaagttcttggtgacctcctcgatggaggtcaggccctcccgcagctgcagcgccgtggcctcgtccatgacctgcgagcgcaccagctcctccatggtgatctgcttccgcaggccacggaaggtcagcttgcgggcgtccgacagtggcaggagcagctggccggtgccgtcgtcacgacggcaccgcctgagcagctgcgtgtagctgaggcgctcgtcggtggacgggtccacgtagctgcgcacctcgctgggctctgacagctggtcgtgcgtgtccttgttgaggtagccacgctggtaagccacctccaggggaaggtggaagcccaggcgggggtccacgatgccgccggtggccagctgggcatccagcagccgcagggcctcctcagtagggatcagctccttcttcatggcctggaagagcgagatggtctgctcggtgtaggggtcacggtagccggtgaccgcccgctcagccgagagcaggcggtcgtgcagctcgggccccacgaggcccttccgcacagcctcatccacagtcagccgctcccccttcaccgggtccagcaggaagcctgtggctgcctgtgcctccagcagcaggcgggccacctcggcactcagcagccctttcttgagagcctggtagatgctcagtgtctgcctggaaccgggcaggtagacaccagccacggagcccgtgccatagaggtagcaccaggcggactccgcctcgagagcctcacggaggctcctggtgccctcccggagcaggttgtaggtctcgagagagatgatccgagcctcgaacaggtcctcagccgtgaggcggcggcgcacgtagtcgtaggaggccagaccctgctggcggatgatctctgtcttctcaatgatctcgatgatgatgatgatcatgcgttccttggtcacccggccggcctggaagtcagccatcagctgggcccgctgctcctcggggatcaggtccgactgcatcacctcccacagggacatggtggagccgccgtggctgccgccgccgggaatgtcgatctgtgtctcttcaaatgcccttcttgtctcctcctcagtgtacacctgcgtggtctccaccacctcagccttctccgcccctttcagtggcagaaggcgcaagcccgtctcggggtcctccacgcaccgctccagcagctgcctgtacgtgaggttctcatgcgtgttggggtcaaagaagcccttggtgtcgtcgctggggtccgccaggacgcggttcatctcctcactgaagtagccgcgctggtaggccacgtccacaggcacgcggtggctgtgcacggggtcgatgatgccgcccgtggcgatctgggcctccagcaggcggatgccgtgctgccggagaaccaggcccttctgcatggcctggaagagggagatggtgctgcccgagtaggggtctctgtagccggtgacggccttctcggcagacagcagctgctcgtgaagctcggggcccaccacgcccgccttcacggcctcgtggacatacaggcgctggttccgcacggggtccaccaggaagccagtggccgcctgcgcctccagcaggagcgcagccgttgtggctctcagcaggccccggcgcatggcctcgtagatggacaccttctccttggtgtcctccaggtagatgccggcgaggcagccactgccctgcagcagcgtccgcacggagcccagctccgaaaggtccttgaccgtcgtcttgccgtccttgagctgctcaaactgggctctgctgaggaccccggaagccaggagctcgctggctggcacaggggcacggaggccgctgaaggacagcctctcctgccgcagggtctccacctcctccacgatggtaatgagaatcttgatgaccttctccacggtgaccttgcccgtgcggaactgacgcaacagctcctgccgctgctccgcagtgaagtactcagagctgatgagctcccacaccgtcaccgtcctgcccttgaagccacccacggggacctcaaccggggtcttttcaaaggtctcacgggcctgcagctctgagtagagctcctcctgccgggcccgagcagccttttctgagagcggcagcaggctcagcccggtcagctggtcgggccggcaccgctgctggagctcgccgtaggtggccggctcccctgtgctggggtcactgtaggccttggcgtcggcccttggtgccgacagggccctgctggtctcctcatccaggcagcctcgggcgcaggcgacatccaggggcacgcggtggctcttgctggggtccacgatgccgcccgtggacagctgggcgtccaacaggcgcaggccctgctcccggggaatgaggcccttcttcagggcctggaacagggagacgctctgccctgtgtaggggtccctgtaccctgtcacagccttctcggctgatagcagcttctcatgaaactcggggcccaccaggccagcacgcactgcctcgtccacggtcagccgggcgctggtggcggggtcgatgatgtgcccggtgccggcctgggcttccaacagggccacggccatgtcggatggcagcaggtctttcttcagggcattgtagatactcagcttctgccccgcctcctccagccatacacccgcgatgacgttggcaccccggagagcccgccgcacagtgtccacctcggctacgtctcgcacagagcgctcacctcgctgcagctgctggtagagctcgcggtcgatgaccctgctctccagcagctcggcggctggcaccaggctgcgcaggccctcaaagcaaagccggcccttctgctcctgctcctccaccaccgtgatgatgatcttgatgatcttctccactgtgatccggcccgtgcggaactgccgcagcaggtcccgccgctgctctgccgtgaagtattccgagttgatgatctcccaaatggtcaccgtcttgccctggaacttgccgaacggcgcagacacggtggccttctcaaagacgtcccgggcctcggagtcagtgtagaccagctccccgcccttggcagccttatccgtgagtggcagaaggcacaggcccgtctcggggtcctccacgcagcgctccagtagctgcaggtacgtgaggttctcgtgcgtgttggggtcaaagaagcccttggtgtcgtcgctggggtccgccaggacgcggttcatctcctcgtcgaagtagccgcgccggtaggccacgtccacgggcacgcggtggctgtgcacggggtcgataacgccgcccgtggcgatctgggcctccagcaggcggatgccgtgctcccggacgatgaggcccttctgcatggcttggaagagagagatctgctggccagtgtaggggtccttgtagccagtgacggcgcgctcggccgacagcagcttgtggtgcagctcggggcccaccacaccctccttcacagcctcgttgacggtcagccgccggttccgcacagggtccagcaggaagcctgaggccgcctgcgcctccagcaggatgagggccgtgccgggactcagcagctgcctctgcagggcggcgtaaacactcagcttctcattggtggccttcagcaacagccctgcgatactgctgcggccctgcaggtagtggcgcacgtcttcccgccgtgcgagctcgtccaccgtggtgtggccctgcgccaaccgctgcagctcctccgcactcaggatgccggcctcctgcagcctctgagctgacaccttccgccgcaggccatcgaagctgtgctccggctctgcctctgccgcggggccatcaagtgcatcccggccattgggcagggtctttgtggcagccacctgcgaggcagtgacctcctctgagtgcgccagcgcggcccggtgctgctcctccaggagctgcagctgctcacgcagcctctggttctcctcagccagcagctcctcctgctgccgccgctgctgctccagctgctgcagctcctcctgcttgcgccgcacgccctcctcggcctcatgctgccgccgccgcgcctcctccatgctggccaccagccgctgccgttcctgctccatctgctgctgctgccgctgctgctcctcacgcagctgctgtgccttggccacctcgtcctggaagagctgctccagcttggccttctcctgctcgatgaagcgctcccgctgtagcaggctgtccttttcagagaggaagctttgctgcagggcctgcgtctcctgcagcagctgctcctgctgcaccgtctgcatctgcagaagaagagggtgtgatcagggaccgccagcccaggagcacccatcacccaccaaagcagatccccgggcccacccgcccgtcgcacgtagagggggcggtacctcctcagacttgagctgcagcagtttggcctcctgttggagcttctccttctcacgctccagctcagcgatggcctcccgcaggcgctcggcatcatggtcactctgctgtcgctggatctccagtgtctgcaccagggtcaccttctcctgggtggcgagctccgtgcggtgcagcttctcaccgatctcctccgcctgcttccggaagcgctgggcgtcctcctcagcgcgggcctgggctcggctcatctcggccacacgcagcttgaggcgctcagcctcagcgctcatctccagctgccgctgccgctcggcctccagcgtccgctggaagccctgcgtctcctccgccagctgctgcgccatctgctccttgtcctcctgcagccgccgcgcctgctcctgcgcaagctccttctgctgctgcagcagttccgcctcagccttgagtcgcgtggcctcctgcaccgcctgcatcttctccttgagcatcttctctgccaaggcccgctgctgtgccaggtcctcctctgccagctgccgcagtcgcgcagcctcttgggccgccacactcagccgcgcggcctcctccgccacctgcttcatcttctcagcctcctcctgcaggaagcgctgcgtattgtccttgtcacgcaagatgagtgcgcggttctcagcctcgatgcgtgccttgagcttgctcagctcctccatctgcacgcgcaccgagaagagctcctcctccacctggctgcgctggcgtgcggcctccgtggcctccgccttcagccgctgcagctcctcgtccagcaggttcttctggtggtcggtctcctccagctgcagccgcagtgttgtcagctcctgctccacctgcgccttctgccgcagcgtctgctcggcgaatttcttatgcttctccatctccgcgtcagctgcctgcttctgccgcagggccgcctgctccgcctgtgcccgccgcgccgcctcttgctcggcctccttgcgcagcttctctgcagccgcctgtgcctgagcccgggcctgtgcctgctcctctgccgactgcttcagccgctcggcctcttccacctgccgccgggactgcgccgcctcacgctccgcctgcacccgggcctcctccgcctcctcagccgcccgccgggccgcctccgcctcgccgcgcagctggtccagcacgctctgctcctgctgcagcgtctgctgtagctcctgctccttctgctgcaccgcgaaggcgtgtgccttctcttccgcctgcagccgcttctgggcggcctcctgggccagctgcagctgccgcgccgactcctgctccgctcgctcccgcaggcgccgcgcctcctccaccttggctttcagccgctcgacttcctccagcgccgccttccgctgccgtgcggcctcctcctcggccgccaggctcttctgcacgcgctcctcagcctcacggcgccgccgctcctcctccgccgccagctgccgctgcctcgcagcctccagctcggcctgctccttgctgcgcagcgtgtcctccgcgttgctgcggatgcgtcccagctccagctccagctccgccttgccagcggccgccttctcgaagctcgccttcagcgccaggatctcctcctccacctgccgccgctgcctcagcgtgtcctccaccagccccttctgccgctccagctcgctgtccgatgccttgcgcagctgggccaggcgctcctcgatgtcagccttgtgttgcgcggcctgctcctccagccgccgccgctggaaggcctcgtcctccgccagccgccgcaggcgctcgttctccgcctccttctccttgagcgcgatctccgcctccgtcttgagccgcgtggcctcgccgatggcggccagcttctccgcaagcacccgctccgcctcggcccgctgccgcgccgcgtcttcctcggccagctgccgctgccgcttggcctcttccgccagggcacgcaggcgggcggcctcctcggccagctcgcggaaccggccggcctcggcctccagcctctgcttggacttctcgctggtggagcgcgactcctcctcagccctcgccttgctggccagcagcacctccatctcggcccgcaccttggccagctcggcttccagctcctgccgtttctgcgtggctgcagccgcctcacgctgcagccgggccagctcctcctccagcagctgccgctgctgctccccctgctccgtctcggcccgcagccggatcaactcctgctccgcggccaggcgctgctgcgcggtgccttccgccagctgccgctgcttctccagctcttgttcagccagctcccgctgccggacggcctgctcctccgccttgccgcgccgccgcgcctcgcgctccgcctcctccttctgcttctcagcctcggcctgcgccaggctcttctgctgcgccacctcctccgcctgcagccgcagccgtagcgcctcgttggccttgagctgccagcgctccagctcccgctctgcctcctcgcgcgcccgctcggcctcggcctgctgctgtgcccgccgctcagcctcctcccgcagctgtgccacagccacgtgttcctcctgcagggagcgctccagctgtgccgtcttctcggcgaaggaggcgcgtttgctctgcagctccgcctctgcactgcgctgcgccgtctccagggccacctgtacctgccgcgctcgctccacctcggcctgccgcaggcgccgctccgcctcctccgcctgcagccgcagctcctccagggcctgcagggcccgctgcttctcgcgcgccgcctcggcctcggccttcacgcgcgaggccagctccacctccgcctgccgcttacgctggctctcgtcctgcacctgcctccgcaagcgctcggcctcctcctgcgcctgtcgcttttgtgcctcagcctcctccgcccgtgcacgcagtgcctgcagctccccctcagccccgccacgctggcgctcggtggcctccaactgcaggcgcaccacgcggatctcctcctcgatgcgcagccggctgcgctcagccgcctctgcctgccgggccttggcctggatctccgcctccgagctctgccgcagctgctgcagctcctcctgaatgctgcgcttctgctgctgcgcgtccaccgccgcctcctcccgccgcaccacctcctcctgcatgcgctgctgcagctccttcgcctcccgctccgcctgtgcctttgcctgggcgtgcgcctcggccagctgccgctgcttctccagcgcggcctccacctcggccagccgctcgcgctcctctgcccgctgctgctcagccagcctctgtggccacagcagagagaagaagagaagcagagagagtgtgaacacgggcaggcgctgacggggcacgcaccggcacagttcactcagacagcgcggagcaggggtcggggaagacagaggccccagcccggcggaggagacagcgtgcacccgcccagggcgctcgggcagcgatcgcagccggccccactgtgctcaccagcctggggaaggaggcccaggcgtcctccctgcttcccgcagacaggcgacggagacagacggacggggagagagagagcaaagcaggagctcggaacctgcgagccacacccagcacacagccctgcctgagctctgctggacaccagtgggcctggctcccaccactggacccctctccccgaccagggtgggaagcctgggtggggcggggtgaggcgaggcggccagcgtggagacagcagtgcagacccgagccaactcggaagaggattcagggccacgcagaaggtagggagaagccaacagatgggtgccttggaagaccctccctagccccacaactcagcacccccgacttctggcagcaaagggttgagcggaaaggccaacgcagaacgccaaggaagagcccacaggacggccgctaggctgcaggggggacgctcacgagggaggagaggcggcaccagccactgtgggggagcagtgtagccacaccaggccaggggggcaggccacaggtggggcagcctggggcaggctgagctgggggcagggggtgctggcagcgccagtggggagagtggggagggccacgagaggtggcctcaggcagctcctgtggctgtgtgtgggacacaacaggtggtgagatggaaccctctgcccagcctccgcccaacgggctgtacctcctcctcctccatgcgccgcagagtctcgctgatgaacttgatgtactggctcgtcagtgtggtcagctcgctgtagtgcgtacgcaggtccacgtactgtggagtagagccagggttagccctgcgagagctgcagctccagccagaggcctgccagcccctcacccagttaggttcggccccaccctacctcctggatgacactctctgatcccgactggaccttgggcttcttggccggggaggccaccggctcaagctgcgccttgtacgtcaccagctggagttcatagtcctgtggcaatgcactgcggtcagccaccagctctgccctccgatggcccctgcccagcccctaaaccctcacatgggctttccctggcatggcccaggctcagggaaagcccgccatcatcctggcaacggtcccggacttggggcctggtgcaggcggctgggcctcaccttgatggcgttgatgtactgtttcgcaaacctctggcactcctcgaccttctcgccgtggcgctcgatctcctccagcagggcctgggtgatggtgtggtcagagccgtggccgcagggcacgcccagccgccccgtccccaccgacccaagcccacctgctcctgccgcagctgctcccgcacagcctggctgtcggccagcggcatggcctggatctgctcctgccgccgcctggcgtcctgcagccaggcgcccaaggggtctgcactctcgcggtagtaacgcagctggcggcccagttgctcgagctcgcgctgccgcacgtcggtctgggccagcacagcctgccagcgctcaagcaactgggcgacccgctcccgccagcgctccacctccacgtcccgctccccgtgccgctgctgcagtcgctcccccacctcctgtgccccccgcagctcatcccgcagggcgtcgaacgtgggctgctgtgcctcggcctgggcccgcagcttctgttggggacaggagggacatgtgcggcttcagctgggcccgctgtacccccaccccgccatgaagcccaagcctcgaaacgataccttcagagaggccttggtggcctcgagctccgggagggtggccggcacggcctgggcctccttgagctgctcctcgtgggccctgagcacctcctcggccccctgcgtgccgcggatcaccaggctgatggtcttgagcctggcgggaaagcggggctcagggccatgacatggggctcgagcaatagcccaagggaatggaacccaagccacagcgacccagggtgctgcctgccaagcccagacccaaccctgggggtcagctgaccctgtggtcagaggcttgcttcaggagaagaacagccttggggagaaggaggttgggagcctctgtaacacaaggacactcaggacccagcctggagagggggtgcgccagccaggaacggcagaccccaaggccccgagacaggacgagcccactggctggatgacagcggcatcctggtgcccacagggcctggaagcgtagttctcagcccttgcagcccaagactgggcgaaggggacaccggggtggaaatggcaccctgtggtagccagcggcggccctatcactgtgctggttctgtgaggagtagacagcgggtggacctgtggtttgcaacacaggaagaggcggcggccctatcactgtgctggttctgtgaggagtagacagcgggtggacctgtggtttgcaacacaggaagaggtggcggccctatcactgtgctggttctgtgaggagtagacagcgggtggacctgtggtttgcaacacaggaagaggcggcggccctatcactgtgctggttctgtgaggagtagacagcgggtggacctgtggtttgcaacacaggaagagactatgacataacacattggaaataaatgccagaggcccttaagtccaggccaggaacaggacagacgagaggcagggtgcaggattccttactgtgccactgaaagtggatccacagcttccccacctcactcagcagccgctgcccagctccactgtctcttccccacacccgaatctcatcaccaggaagtcccccggccgccactgtcgaagcgtatccagccctgaactcttctcaccacctctgcggccaccaccccagctgggcctcccgcctcctggccagatctctgaacagcccccaactcgttccctcctgcaccctcctgcaaggtcacagccctcaccccagcaccccccagccgaccccagcccctcgcctgtggccaggtgcactcacttctccaggtagatggcagacaggctgcggacctgctccagcttgcccagcgtcagctccagctccgagcgcagcgtgggggccgcaggcgatggctctggtagggccaagaccttctcggcctcggcagagagccgggcgacccccttgcccagcccctccacctctgcctgtgccttctgcaaagacagggagtgggaacgcactcatcaccgagcgcagcacacagcgccccttgaaggccaaaggagggagggtgggaggagggatggggagagggatgggactggatggggggggacggcccctgcctgctgctcggcgatgcgctgggcacactcccgtgccggctctttgtccagcggcagccgcaggcggtgcacggtgcgcgtctcacaggcctccagctgcagccggatgtctttgagctcggagatgcagcgctggcagcgagactcttcctgtgcacctggggaacacatgtgggtcactccaccgcccacctcgcaccagcccaaccgccccagccctgccgtgccctaccctgttccaggctctgcagcagctgctggtagtggtggctgcaggagccgtactcgcgctcagccatcagccggtcctcgggtccgaagccgcccgcgtcctggctgtcccgcaggaaggcctggtagtgcagctccaggctgtgcagggcttggcgctgctcctctggcttcagggtgcggaactgggggaagcacgtggggctgagtgccgggcgaggcggccgtgccctgcacaacgcctctcccctcctcccacccagagagcccccggctcgggggcaggcgtaccgtggccagggaccaggagcggatgagctgcacgtcgcggcgaaggctctgccaggccagaaggctcttcatgtccacgtgcaactggtgccacagcgtgaccagggcctggtgctgggcctccagcctggcaggtcagggctacagtcagcgtcaccagcgccccacccgccttccagcccccacctgctgagcccccgccacccacctggtgacggcctcctgggcctcctggttgggcgggggcaccaggaagcacacggagggcacggcggcctcgctgccggagctgctgagcaccttccagtgggacggctgtgcagggcccaccagctggcactcgtcacccttgtgcacagtcacctgggacgggcagagtcggtgaggacatggccacaccctgccctgcctggccacgccccccagtggacccccggcctgcgctcacctccacctgcttatagtcgcacacggccagcaggggcaggcggccccgcatggggtgggctgggtggcggggcttcagctgcacgacggccttggcccgcttggccaggcctgagaggtggcccttgtactcgttcagctgttccttctcgtcctgtgggggaggggcagcatccagacgagggccatggagacccacaggcctgccccaggcacccccagaccccgggaccaggcctgtggggccctcctgatgctcccggggtggcagcacttggaagcaggaggtatagctgggacaggccccgggggttggccccaagcagacccatgcaccctcgctccttcccaacccagacagggcaccctcctctcaccccagctcacccaccatgtcctcccagctacgctctggtccctacaatgccctcgccccttgcccctcccctgcgggctgcagaaggtactgcctcctcccatcccacccctctgcgggggccaggccgcaggacggcacacacctgggagctgccggctctccccccggcccagccctgccgacctcagaggccatttcagtctccagtccctcttccctgtcactccccactgtgcacccgccctcctgggtgatcccacccctgctcccagagcacaaagcccagttccactctgcccgctccagatctcaggccaaacagctggtgccccttctatagtacaagggctggcagtgctccttctatagcacaagggctggcggtgccccttctacagcacaagggctggcggcagctgctgacttcaggcttccactcactctgtggctatggagatgggggcggcccggcttggaccggctgcctctcggctccccacatcctgcctcattccccccttggctgacctctacacctcccatggtgcctcccaactcctgctggcccctccagttgccccctagtctccagagtacccatgcagcccagaacatcctgcctcattcccgcttcggctgacctctacacctcccatggtgcctcccaactcctgctggcccctccagttgccccctagtctccagagtacccgtgcagcccagactccaggccagcccctcctgacacgcccctgcacaccccctccctcacctgggcatcctgcagcaggtcctccagccgggtgacggtggcggagcgatcacaactgtatttcctacgcagtgcctcctgcagcttctgcaactgcccctcggcctcccgcacatctgagaagaactggggcagcgggagggggtcacgccaggctacctgggaccagagccccagcccacagttgtcccagggcaggcccaagacgggggcactgaggaaggagtggcaaagcccccaggaggcctggggagcacccctgtccaaggccccggtcaggctgcaggcagcagctggcaacgtctgcagacaggagggctcctgattggagctgccgagggggtccaggggctcctgcaaggctgccgctgagccacagtgcggagggggctccggttctcacctgaaagtaggcagcgttctccttcaggtgtgcctcgatacagcagcacagctgtagcatccagctccactgcgtctgcagggccgcctggaaggactgcgggacagcaggtcccggtcaggccccgccccgccccgcctggggacccggcacggccccccccgcagccccgcccctacccagggagccccacctccaccgtgggccgggccgggtggtcctcccgcagcagccggtccccagcattttggagctccttgatcttcttctccttcagctccagctcccgcatcagcgcctggcaccagagcaaagggtctcagggacggccggccacacccggctctgccacgctcccagcaaactcgacccagggcccccactggtctctgaccataggggacggccagggcacagctggggagggggctgtggggttcagggcagctgggccaccgctcaccgagtagctctccttcttggcggtcatgttggtgttgcggtcgctccagtcgaagcccacctcctcctcctccttctcattcagccacattagctccttagtggcggctgccacaaagctgtgcaagctctccagggacctgaggcgggccttggaggagttctgtgggcaggagggtgcgtgtcagcaggccgcgggctacccacctcccccggctggccctgcccccactcaccagcagcttggcgtactgcaggtccagccgacccaggcagtcacggtaggcaccccgggtggcgggggagagctggccctgcaacagatgagacggtgaggtctgcagtggctgggcccggcccacccccgcactgcccatcgctcagcgccacccacctcgtcactccgtgcccgctcgatcttggcccggaattcttcgatggactggtgcaggcctcggtggctgcccagctgcgcctccacgctgggcaggtccacaccccactcagcgccatccacacggtgctggttctcctccacccaggccagcaggtcctgcaggtagcgcagagtggagtcctccagctcggggcgcctctgcacactctgcagagtcacctgggccacctgggttgcaggggccgccacgcctgccttcagccgtaggttgtactcggtgcggatggctaccaggcgctcgtgcagacggtacaccctggggcagcagaggactcaggtaggtgttggcgggcctggggccgtgtgtacctgggcttcagggagggcagggcggggcccacctgcggtacatctgctcgccctgcgggtgccgtccatccttgagggtctgcacgtcgttgaagagcagccggatcatgctatccgccttgtccaagtcccgttccacctcccccgcccgctgtggcactttgcctgcagccagcagccggacatcctgcaaggtcgttgccatgactcggagcacagctgatccccctctgacctcacaggggccccggccaagacggccaccctcagccgcttcctcagcctcagtgggccactgcctccatccctgtccttccccttccctccctgcccacctcacacatcttcctactggccttctgggggattgggaccaagtccagagtacttagcccagtccaagaaccgagacccccatgaccatgtctgtggggtcctgggcctcatcctccatcacccaccctgggtaactcctcctgtaatgccacgtgggccctgtcctcctgggcaatcagcagtgggttgggccctcccccaacccctcccctaacagtaagccgctgtcggggagggggcctggcgggggcaaggcagcccagcgtgggttctgccccgtggccagaaaccaactctgcccaaagcaggcagtgagagttagctgcacacgaggagggaggagctcaggcctggattccccaccacatgccccgcccctgcccctgcccctgccccaggagcccagggggacagccccctcctggctttagggctgcagggcggggcaggctcctccggcctccctcccgcccactgcctgccccacaccccctcaccgactgcagcagggcgtcggcctggttcagctgctcctcacacagccccgcctccatctgcagcttggtcacgatgcgctgaagacactccagcctgcagcagcagcacagggaaggggccgcgttggccgggtccggcacagccctggccacagactgcagctcgcctcccgctccggtctccctggctgtggcccactgtcctaaggcgagtgggagcttgggttcccccgccgggggcggggcggggaggggggtttccttcccaggcagtgacacaccctcgggtggttcccctgccaccacagggccccacccacctctcaaactcgctgcggagctgcttctcccgctccaggatggccacgtgcagcttgccccactccttctccacatccagcgggtggtagccagggggcaccttgagctggcctgcttgcaccgctccctgtagacaggggccacactcaggccctataggcagggggcagggggtggggcgctgggccttcagaccccagcccaccagacctgggacagccctggtcccaaaggcagggccaggtcggctccggaagaacctttcaggcctggggcgttccaggacaccacccacccctccagcggtcccactcacctccagggattggtagatgcccttggacctgttcttgtcggcctccttggctggtagctccatctccttaaacttcaggaactgagaccacaggatctgccagggacgaggctgtcggcaaccacgccgggctctcagggcaggcccaggaccccgccccccacggcaggcccacctcaatctcctcgaagctggaggggaacctgcgttcctcaaaggcggccgtgtggtgtcgcatccactgaagcagcagcagcaccagctcccggtactcctgccagcgcagctgcagctcctgcgggcaggcacgggcggctgtcaggggtcgtcggggcgtccaggcccaagccccctgccctccgggccccccactcacgttggccctcaccccatcctgcacgtccggcacgcggggcatggcgtcatacagcgacgagacgtaggtgatgatggacttctcgtcgggctgagggacatccacgtctgcagggaagggcagctcagcggtggctctggggcaggcagcaggggaagggacagggaggaaggccacgcagacgtaccctcagggtccaggagccgcgtcactcccaggtcccgctccgccacagagaaggcctggtccaggttctccaggttggtctgccggtacaccttgttcatgtcgatgagcaggggcctgggacaagcaggtggctggtcaggtgggtgggacaagaccagcggccacaccacacaggcgggtgcacaggccggctcctcacacatcccagcaaccatggacccccccaacactcaccctgaaaaatacactgtcacatgggcagagctgagagcaccctgccacccccacacccagaagcccaggggcacagcacagaggactgcgcagagctgagggtgccaggcagctggggttccctgcagccaccctccccaccaggcccctccggaggcgtccacagagggcacatgcacctggctgtgaggaccagcagcccgcgggccctccagtcttgagatcaagtggtggtgcttctgaaggacaccagggtggggctgggccctgaactccaccaccccgaggcggccagctggcactcatccctgttcctcctgccctcctccctgccccaacgtgtctgaagttgcctagtggaggcgctgtgggggtgcccccagcccacagccccctgcccccggggccatgtacttgtgccggtggatgatggcattgaagaggcggccgtctctccagctggaggtgaagttgtcgcatcgcaggccctggtacccctccaccattcgctgcgaccacagcagcagcttctccttggccgtcatgtcctccgactgcccactcacctggatatctgagatctgctcacagcagagaggaggccacagctcagccacagccaccaggcctgctctgtgcccacagccacatgcacaggggcaggggtagctcagcacccagggggagtgcatggggccaccaaaccagccagggcagcaccgggctccagggcccttccctgttgggaagctgctgggactggccatgcctcggggccacaagtccagccactccagccggtggcagctgccaccacgcagctcagaacccccaaccctcactgccaccacacagcaggtgcccactcccctagctggggagggctaggctgcaccctgcacctcccggagctgggatggagcagagtggaagggcagtgggcataagaggaacccacaagtgtaccactaaacctggcccagaacccccaggcctggaaaaggctgggggtcgagctccatcgatggttgcaggctggcaggtggggcctctggcagcctggctttacactcagtggcatgctcaggccaggttctgcccacccacccctagctgcctgtcgtcctgccagcctgtgtgactcagctgccgtgccagcaccaggctctgcctgctcagctctcagatttgtggtttcctgtgcagccaggacaagcagcgggtgagtcagcctgtgctgcgcagaagcctccccagggcaggcaccggggcctgcattcctccacagggaggctctgggccctgcccagccagggccagagggcacggataggtggcctcagagagaggcctgtaccctcaggccacagatccagtccagggttgcggctggcaggaaggcacccaggtgccaccatacctacggcgccagtcacctcccaggccacgccctagccagaaagcggatcaacccgccagccaaggagcccaggctaccctggaaactcctgcagggggtgggggtcctgggggcagccgttctacctggaagtgcagaatgattgtccagatgaggccaagggtcagcttggggttgccgtcagcgatgtcatcattcctgatgttcaccagcttcacctgtgagcgaggggctctcggtcacggcccacagggcggggctggcttggtgaggggtctgggtggggcccagggcctgccgggcagccttacctggcggtgccggaggtagtccagggcaatctggacattctgcagcttgtggaaacgcatcctccccttctcccggggctgtggggaggcacagtcagcacccacagtgcagctgcagctcccgggccccaccctcagcatgccccaaagcgccgcagcaaccgagccaagggtcttccccagggggcagcagcccctcatcccaggttcaccctcccccgcagggaaagggaggccaccggcccaggggccaggccaggcccatcagggctcgggaagtccagcgacccaggctgagggaaggaaggaaggggtgggaggagacaatagccaggaagcctcgtgtggagggcagtggcactaaagggggggtcctcctgcctggcggtggcagccacagcagccaccggtgggtcccaggccagctctgggcagcacggtggacgggcagcttgacacccaaccacctacccgcccaagagccaggcaggggttggccgacgggccaccagcccccagaaagccgggctccacggtcttggggagctcccgtgccgctgcagccggcaggcacagccactcaccaggcgtgagctcctgcttacgtcccgctccctcggctgcccggccagagcagggcaaagggtaaagggcagaggtcaaggttcagagtccaagcagcagagaaaccaaagcaaagcggagcatgaggttactgtgtcccgacgcggagggcggcaaggcccagagcagccgaggtccgagggttgcggccactcccaggccaggccctcggctgtgatgcccagcagcctgggcgggaggtgctgccagggacgaggccagcctgcccccagggagaaggcaggaggggttgagctggattccaagtagagtgggcggccggagaggccccaaggagggaaggcaggcagaggtctccaggtggggcaggcggggcccggagggggcaggggcacacgtaccaggctgtcccccgagaggacctccagcagggagatgaggttgtggccatcgcggaggtcttcatacaggtcactgatgtgcctctgggcctgtggggacagcagcggctgaggtggccagtcccccagagccaccaataggccctgagtggctgatctacagagtgggtgctggtcccagagggaaggaggcgggggctgagtctcccgggagcccacggaacacaccctgccccacggaggcacctacctctgcccgccagtgctgcaaggagagaccaggaaagaccagaaggaagaggaggaagagagaggcaggagcaggcgtagggaagaaagaggacagaaaataacaggtttcagagatgaaaggtgagcacacaggcagcatggggacagccttgggcggcaggggccaccctccctcagcgcctcccacagcctcagcccctgtgacacgcaccagcatgcgccaccaaccttgatgaggtgcttgttgacccacttggtgaaggttttcttctgcacacgatcccgctcatctgggggagacaagaccagcttacctggggcctgggagaagccccgggggccctcaggtgaccaccgtgcagacacagcagcctggctggccaggtcctgcctggggagccccaaagcctccctcagatcacacactgagacccaggcgccctcacccgcagcccagccacacagcagagacccaggtgccaggggcccaggcgccaccaggtgcagccaccccaccccggactcttcccccgaggaaatgggagggtcctgggcgcaccctgagcccagggcacacaagtcccgtcctgcagtcccccccggcctctacagactgagacccaagcaggggtgtggcagagccagggcccgggcccgctggggtgttggaagggaagccgcgtgtgctgctgacagggcagcgaaccttccccagagcgcagagttcctcgcccttccaggcccgacatctgacgctcggaggcccccgtcagcctcgcgggcgcctgtcggcccactccgtgttgggtggggatggctggcccccgacccccatctccaagaccagccccccagcggtgccaaggctttcctgccacaggaagtgggccttcctcccgcaggggcccgccctgcctggcgggggtgcccgaggggagccctgctacctttcttgccctcagaggccctgagcacagccaggtacaggttgtcctccgagctggttctctttcggcccaggccctcgggctgcggcacgcggagctggtgctgagacatgctgcccccacaccttcgtcgcccggaccctcggcctcaggcacggtgctctgggcagccccgtgtggcacacaggcagctgaaggctggcggccccacgagacgctcactcggcacaggctcagctcagagccccagtcggtgcggccactccctgcctgctgtactccccggcgaggccggcccgcccccgaggccccaccctgcccaggccgccgccagggaggggagtgtcccggcgggaaggagcaagcagccccctcccccacagacacgccctcggcccgccagaaacaggaaaccggggtttcctcacccaccccgaccactgcagccccctagggggacctggggacacggggagctggcacttcactgcacaccaaatggtgccaggaccgcagaggaacacaggccgtccccacagccacccagaaggaccccccaacagactgaagggctcccccgacgggaggggctctgaggccacgcctctctttggagctccctccaggcctgggccaggccctgcttcagcctctgcccacccaccctgccagggcggactcaagaagccgctgatacctggcgaggggaggggacctgctgcctgtcagctcttgcagccccccaatcacacctcttcacagacctgcatgaagcggggagcacaccctgccccatggtgcctgccctggccctggggccagtggggtcccaccccaggcctggcccctcccaagctgcccacctggcacatcctggagcagtgcccacctgcggagcccaccctgccccaggcagacacctcacgtcggaggcgcgtagctgagggctgactcacggaggccgggcctcatgggggaatggagcatcgggaagccccaggaggggcctcgccagtgagtcagggatggggagggggcccaagcctgtgactcacagaggggaagccacacctgaggcaggacctgggcgaccccaggggtggggggtgctgtttgcagctgggtggggctcaagggaagcagtctcatgctgtaaagggcaaagggcaaagggcctgcgctggctggggcctccggctccctggggtccggggcggagctgcctctggccagcttctgggcctgcccagcccacccgaccaccataggaaagaatgcgctgccccaaccacaagaatgttccagccgcacatcaggcagattcggtccagctgggagctgcactcggcctcagttctgggaagagctcaccccacctcattcctactgcccctgaggccgtgagggggcaccagaaccctcacaatggggggtgcccaaacccctcagaggtggggaagcccccactccacgccaaggggcacagccagcccctagggctctgccacatcgtacacgccgcccaacgaagacaccccttggtctccatgcatggtctctgagcctggcatgagattcagggtgaccctcttgctctgcctgtccggcccagcagcctccagaacctcaggagtcaccagaagcccccaaatcaaaatctgaccccgcactggtcagcacctccagtcttgtgcccaagggcaccccggaccccacacctctgccgcccctccctgggtccaaagcctctggaaacactgtcgcctcttcagaagccctgggccagcagctaccctgaggccaagccccgcgcctgctgggtatgggctctgggggcccggccgtgaccaggtggctcctgcctgcaggaacggggctgccactctgctgaggcacagtgtgagatcccggaacagccagggaggtgggcacagggagtccacgacagctggaaactgggagccggggccaaggtccaggacccacgtggagcccaccccagccaggcccctgttccagccttctccctgccactaacaggcctccaaagatgccgccctgggccgggccagggtcaggaatggggcaggggctcagggaagggaaggggcacggtggggactccagacacggactcgggcaaggctgggaccgggtgaggagaagggctggggcggggcagggctgggaccaggtgggctgggggctcggtcaggggcctccacctcccaagcctggctcaagctccccttccctacttcctgcctctgggtgcctctttgctctgagctcttccctcctcatcacctcccctccctcccagcccagcctgccccgccccatccaatcctattctgaccctaaaaccaacagacacacccgccccacccagccaggctacacccaccctctacagctgcagctcagctggctctcccacctgggacgcacccagaacacccccagctcaggtgcctctgcacacctgcctgacacctgtgctgtccagggctgctgaccctcggccgccagcccagggtccctcacgacaggcactgccgtggccctctgaggagtatcgcccccgttttacaggtgtggaccctatggctgaggtcccgcagctagtggagacggtcctaggatggaaaccccaagactgggaagggaatcccactggcccaggactgcagcaagtccacagaaggcctggagccccgccttcagcacctcctccctcccccgtgtcctggaaacccaggccaaagcccaggctgacgtggaacagccgggggtgggccagccccgccccctccagccccgccccctccagccccttctctagagacaaacaaatgggggtaggggaacatcaccccgccttcctccccaggtgtttccggagctcgggggcaaggctgcaccgggccaaggcgccacccccatcccagcccaggcggcggttcccagcagagacccagccccactaggtgagagcgatggtggccccttctgtgccaccggccacgccactgcacccacctacgcagcacagctgctggtagaggtagcccctgcgggccggctcgcagcccccgtccagccagcacggccgctccagcaagacctccctcggcgaggcaaaggcgccccccgcccccgacatgccggccacggccggagccctggttcggcccacggacagtgcggggagctggaccgcggcggcgcctctgcttccagcccacgctgcgaggctgccggcttcgctctccacctcttccacctcccccccacaatccgcccactgcgggagcgaggcccagacccaaagaacctgcccctggcgcgcagccccgcccagcgcagccaggaagccgcgccccaacccacgggccgggctgggaggctgccctgggactgaagcggcatgggagggggcctcccagcaggatgtgcggtggggactgcagggcccagggaggaaggcagggcatggggccaggtggtgggcagacaacgctggaggcagaaccgaggagctgagccgcgtctggcaccaccagggagtagaggcatcctgtgagccaggaccgtggccgaagggggcaattgtgggctgaggtggggaggcagggacagtgtctggtccccagccaaaaacatggatggggaagaagccctcagcccaagtcccatcctggcagctgagtccccggcagctccgggcgtccccagcgccacgcctagaagccccatcttgactcatctcaagtccggggatccagcagaggagctgagccaggcagcgccctcactgcaggagaggtctggccagccaggtccccgataggcagtccctctggccagaagcccataattgaggctgcccaatccccagggccccgccccatcctgtgctgggcacggttgccacctgggaccacagcccaggagctggtgactttgagcagggagggcagggcacagcctggctgcccccgccccctgtgcggcccgagggcatgagggcacctgcctcacctgcgtgtggctccaccccctgctgtgtgtgcagggagccacctccacctcagtgctggccggacaggcacctgcccacttgtccctgccacggcggctgccacaggcctcccttcgtgtgggggacgctcctgccctgccggcctccgcttccacccacctgtcccgcacaggctgcaggctgagggccactgcagagcccgccccgccctgggactgcagcagggtcagggtctacactgcagggtggggtggaggggcaacactgctttcactgacattcagcttggaaacaggaaggggagggcgcagggaatgaaggggcgggaggcaggcggcccctctgccccgcctcgagtccctggcagccaccagcggggcttaccttgctcgtcctgcgcccaccgacgtcccctgcgccagtgccacacagcggccagggtgacaacgtgacccacaaccaccagggagggaaacaggctgcccgagggctccatagccgccacgcggagccgccagggctgcccttcctgcgctgggaaccggctgctccaggctagacagccccctccctgcgtgcagggcgagcgagggggagcgccgggaccggagcctgccctgcccgcaggaccgccccatacgcggcggcagccccacaacagctcccgcccgcctcctctcctcctccctccgcgggtccggccctcggcgcctccccaccctcgctccccacccggccggctcagctgtccctgcgcagggctactgacgctcaaggttagttggccttaacccctgcgtccccgcggccacacccgccgggaggaggggccagccgcacgcctggccaagccgcagccccccagcactgcccgcggcctcggcacacaccctccctccctcccagcctccccctgctgtccccaccagaagaggggcccgagcagcccactctgcctccaaggctgccctctggggacagctggcaggcatggagggatgccagagcccccacctcaagcctgcagctgaacccactgcactccttcaacttcgccctcctcaccagccccaacaccccaaaagtgagactgcagaccagggctgagggggtctgggtgagggcacatgaggcaggctgtgtgcagggcgagggacagcgcccctggcctccagcctcagccccagccctctggcccctgtccccagcaaggggccaggatttcacaaggctttcaagggctgcccacctaccgggcacgatcttcatcggggacggtggcaggagcccacggggcagacggagcgggccaggggtgtgggaggtcacaggcccctcggaggaggcacaagccactggcggcagcgtcgggtgggaggagggcacggccgtgctgctgtcagcagcagcttgtgggggaggggagcagtgggcaggggcccaggggatataaatatccgaggagggcgcgcaaggaccgtcaccacccagacttggaacatgacgcacggcgccagggcacccaggccccgctgcagtcaggtctggctggacggtgccacccgacacctcggtcccccagctcccacagggggttctaatataatagagcagggcgcgggaggtgcgggctcacgtccctgcaggaggcggtgcagtccccacccacctgccctgccaagccagggggtgctcttggaaaggccacaggggccaagagaagaggccgcccattctcccagagggccctgcgcaggtcactcaacacagcacctggccccaccggtggccgggacagccaccccaaagtcacgcgcaggccagagacccaggcagcccgaaaccagggctcaggcctgcgcctgccccacagcacagcctctcctggggtcccagggatctgggatggagacgcctctcctgggccacggcaggagactggcctggctccacccaggagtcccgaagccctgctctgtggaaggcctgggtcagagagccgggccacaggcaggcccacagcatatcctatgcagatcagatcccaatgcagccggggaaacaggacgtgggacacgcacagtcctgctcctcttcctgggacccctgtctgctgggcgcacccctcaggcccaggagaatgcacgttgacggtataccccattccacagcgtcgctcctggcaccacatggaaccctcagcaaaccccatgaagtcctataccatgaaggcctcatacagaccaggagcctgaggcgccgcctgctgtcccgcacgctgccatctgagcccaggtggcctccagtgtagttacctcagcccacagcaaggcacagtgaaccagcctggccccgggccactgggcaggccacccaggtccatgctgggaagcccgcggacaacaagagggccgggcccaccccagcctcctgctctccagccccacacctcaaaaacgtgcggccgagggaaatgcctgcagtggcccactctgggcggccaggggtcgggcgggcccaggcagccctgagggtcagggatacccaggcatgccagaaagggcccaactcccagctgagcccaggacagcatctggccagcagtgggcaggggccgacaggccggacgtttcagcccactccctgccacgtgctggggaagcctcagaggagcctgactcaatggcctgggtgagaaccagctcctggcgggaggagtgccccaggctggcagcgggcagttcttctaccactccacggaggtccggacaggcctgtgcttccgggacacacatcacacacacccctggggcagctccgagagggggctgtgcctatccctgcatcccaggtctgacggcacagaacggtggacaacgggaagagacaggtctgccagaggcggccccggccctctcctctgcctcccacagcccccagctctgcctgccctaccttggcccagctgaatcagctcctccatgctgtacctgtccatggctgccacacaggccaggctgctccgagagccggcagggaggaaggcgaggcaggaaggagggaaggggtgggaggcagagggagggcccactcatgccctggtagcagcggctcctcctcgcagccaccccttagtcagtaagcagagatgaagcccagccgactgacgggtcagaccagcccagcagacctgcctgggggtgcaggggactggcctgcctgcaatcccagagagccctccggccccagcccacgggtcttccctactgttcctgccccgcccagcagaccccccgcccagcagaccccaccctgtagcctccccttcccgctgcaggccccaccagcccagccctgccctcccaccctcccacccacattccaggcatccatgtgcccagcggtatttcaggagccaggcgggagcagagccccaaactgcccaccacaccccactccttgagactcacattcctcagccccaaaggtggtctcttcctccacctgagtcctccccaaccagcacagccccaggcatctgtccaggggcaatggtgacacctgcctcccctctccatacctctccacccaggtgcttgctgaccagtgaagtgcaaatcaaatcccatcgtaactaccccttagaagcctgccggcgatctacagaaatcccgcaaacgggtgactcggccaagccagtgatccctgtggaaagctggccgggccatagtccctccacctagagcaccctgtggctgggaagaagggcaaggcagccaggccacctccaggcttcctccttgacgcagggccacagagggtcaaggggggaggtcaaggcacaggcgtgtcctccgtgtagaggggaagtcatggtggctacccaacccctgccctttgctgtgggaagcagctctaggtgctgtgcgtgtacagcgctcaccgtggtggcggctacctggcccctgcccgttgctggtgcatggacagcgctcagctggcgtctcctccacacaatcctcggttccttcagaattttgagccaggcaaagcatcgccatttgcaatgtaaattagggctgggcggtagctataatcccagcactttgggaggctgaggcaggcggatcacctgaggtcaggacttcaagaccagcctggccaacatggcgaaaccccgtctctactaaaaaaaaaaaacaaaaattagccaggcatggtggctcatgcctgtaatcccagctactcaggaggctgagacaggagaatcgcttcaacccgggaggcggaggttgcagtgagccaagactgtgctattgcactccagcctgggcaacagagcgggactccatctcaaaacaataagtaaaataaaaatgaaacgtaaatgaaactcacatataaaaacacattcctacagcttcccaccacaccaagcaactgaaactctgccacaggcccagggccttcccatgggtcctctccctctggccttccggcctccctctgtccctctctctgggctgctcctggcagggtaggcacctcctcagagccctccctgattgcttctgaagccaccttcccatcacgctctcctcacccagttcaccccacatatctggagccccctggggcaggggctccatctgggtctggccctggcctgtgcatggctaaacaagcaggtggacggatggcttcccacacagatgtgttgctggcaggcccccatgggccccacccagggacaagcagaccaccagggcacagggagggcaggggcctcactgcaggggtacagctggtgctccctagccagggctgggtggagaggggcagcccatccaacagggccatcctggaccagcacagttggcccacgagctctgaccttgcccttctgccaacccacggagcggctgtgcagtggggaagggcagggcagctcactgcttggtcacttaaaaactccaagaagtgcctggtctcaggtatcatcagaactgccccgggctgtatgcagggccatccggacccctgtcactgcctgaggcccagccctggccctctgccacaccccacatccgagccgcctccttcccctagcttcccatcccaagctcagcccgtgaggtccagggcagagaggggtttgagcctgctggccctgactcatcccggagctgtggctcgcttcctgttggaaactctgagctgctgctggcggctgtggctttggggggactgagtcacctccatcggggaggggtgccctccgctctgcctgctgcagccacacccagcacaccccactcttggccctgccgccagctgcccgccctgcaggcccagcccagccacggacaaggaaggagaaaaaggaggggagggactcccagtcaccacagctaggagttgagcatggggaagctgggctgccaaatgaccggggagtgggtgggcaggggtgccgggtgggagaggacagcaggaaggccacatgggccggggcctggactacatgcctggccaagcagtctttgtctcatgcctcctgtcgggagacatgtcgtccatttagagaggagctggagaggccactaaacctgtccaaagccgcagagagagccaggaggggaggccagcctccaccccacagcctcactgatcctcccagatgggcccaaggcaagcccctaacaagtccaactcaccccaggccagccagcaccagggctccgcccagcatcccacacgggcagctgcgccctaaacttgggcctcccctgggccccctcccccacaccctggcaaatcctgcccaccctgagagccccaccccaggcccccttcttcagcctgagagagcaagctgctcccaggtgccagccccaaagagggaggtggggccaggtgctgggggaccgggccatccggagccagcacggagggcagagtgctccacagtgtgtgtgtgagcctcgggctgcaggggacacatctgcccacctgggtcctgctggtacaggtgcttgtggacagagggaggccacagagaaggggcagagcaaagggtctctggaagcctctgggatgacaggacccgtcctgtcctgtgcgacctggttcgtaccgggaaaggcctatctaggccccaggctgggccagcagacaccacaccacagcctggcctctgccctgccggaggagcctcctgcctggaccctgcgcttctccccatcccgcccagggccgtccccagccaccaccaagtccaagctggccaagcactcagttaccggtcacaccgggcactctgtgcggcaccaagcctcacccatcaacccccgcggcaagggaggcggccaggccatgtgctggaggagggccacacccaaccggcgccagcacctcctcgcacacccccacctcagtgccgaggagcctcggggaagacaggtcactgggacaggagaggaggcggagggggcgaaggcaagggcagtgttggagagaggggagggggcgccccggggtgtgcctgggccacaggctcctccttggcctacacacccgaaggtccccagccgaggaggaggggccacatgggcccatcagcaagcgcaccccctgaccctcggctagggggggccacctgctggtgtgagcgacgctccgcaagccggctgaccactccaaccactccagcccaggcccaggcccaagacccgacaaccagacccctacttgccacccatcatgacttggggtcagggtgcagctgacctgtggctggggcaggctccgggcctggcctggccagggtccgctgggtggtagcaggcaccacaggggtctcaggtgacacctcctcaagctccttccgacggtagacccgctgctcctccgtcggcagcggcccccgcttgggtggggagcccaggggaccctgcacagcctgcacgtggggggtgcggcgtgcgggcatcaccatggcgacggggcggcgcacgcgctgcagagaggcgggcacgatctctggcggcaggtgcaggtactggcggaggtgggcgatgccttcattggtgaggtaccagtaaaagtggcaccaggcaaaggtctcgcggaccaggccccgtgcccgcagggacgccatggcacgcatgacctgcaggttggtgacgccgggcacatgggggtgcaagctgcggggccgccggtccttcttggccaccatcacgccctcgcggaagagcacctcatagatggcccgcagctggtcccgtggcatgagcatgccggccaccatggctgctggagccgggcagtcagtgcgggggcaaaggcagcaggcagggtaccacgagaaggcccggggcgctgcgagaagctcccgcgctacagggtgtgacagcgggcagcggcagggcaggcgggcgggcaggcaggctggggtgctgagcgtgagggcgcgggctcccggctgtgtggctcgtggcgcctggctccgtgcaatccctgccggcactgccggctgcccgccttcctccaggacgccgggccggccccctctgactcagcagcatgggcggcccctcccacccacagccgacggggcccttgtagagtggggggcacctcaagaggcagcggccacccccacagctgcccctttccccccaccaggccccacggctccaacgtcagaaatgacatcagtttctaaacacatccttcaaggtccctaagactgtgctggggcaagtgggggcggatatagaccaagagtctaaagaagagggtggcagggcaggcaggggggctgagggcaggaggggtactcggcagggatgtgggctctggtgtcccggcttcacaaggatctgaaggggggtgctgggctgccaggcctggagggatgagggatgcgaggcttgagcggagaggactagggcctggggaagaagctggggtcttgcgggaggaagtccgaggggagcggctgggggcagctgccacagcacatgaggagggctgcaggcaccgctgctgctgtccatcaggcgggcaaacggacagagcccccacctccacacaccaggcttagaggcagtggccactcaagttaacacttcccattccaggccagattaggagtggcctctccaagcccacagccctctgagcagagcaccggctagggggctcagaggggcctcaattcacccccacctccaacccagctgttggaggccagagattcccagccgctgccacagagaaagtcaccgagtccctaccgcccacagatgcccaccctgggcagcccaagtgcccgtctgcaggccagatggatggctgcagggtggaagaatgccaggccagaagacggccagggcccaagggaagggaagaggaaactgccctgtgaggccctgcaggcctggcccagccacacccatcatccacccccccctccccgccccgctgctgccgcccccactgagggtccaggcatgagaaccgcacccaacactcccactgtcccacgctgtgctccatggacccccacccgtatcgctgctcgccccaagccgacacaccccttcccaccaagcccggcaaacccgggaactgattataaatagggcggtgggggggagtgggagagaggggggatcccgaggtgggaggcgctggccagcagccggcaggcggccaacaagcagcttgtgggggcgggtttatggggccgtcgccatggcgccacggtgcaggctccaaacacacacacacacacacacacacacacgcgcgcacacacgcacgcgcacgcgcacgcctgcgtacacagaggtgtggtggcggggaaactccgaaggcatagccacggttcccacagccctctggcagggccagctcgctgcggcatggctctccctccctctgaagccagccccaggcaggaaaaggccagcctcaggaggtgaggctccaggaagatgtagggaccacagtggccacgcccctcggaccaccagcacctgcggaccctccacccaccagggttgtggctttgggaacaacaccagctgggtccaagcctgcccagccctgtgcccaaagaaggccctaccctcttggccagtccctcagcgcacccccccacactgacctcctgcactcccggcaggccgaccgcatcttcctggcctgattccctaacctaatcccccccagatctccaagggccccaccaaactaacccacgatacccacactgtcccaaaatgatcccaaggcctcttaaaagcacgtggacctaggttctctcctacacaggcctgcaggggtgccaggactgacccccgctgggccgccacccaaccagccccgcctcccccaagccggctccgggcaggaaagggcggtagcttcctccagcagagatggggcggggctcggcgggagtcccctccctcccaccagccaggggcctgcaggcgggaagggaagccgcagggaggagcccggagcagaatgttcctggcccaccctgccagctccgcacacgcccccctgcggcatgcgccacccccccccgcctcgcagcacacacctcctgcagcacacaccccccccgaagcacacacacccctgcgccagggtccaggcgtcccccaagacccccgggcggaagctaccgccccctgcccccaccctgtgggaaccgaagcgggagctgattcagcactgggagggccagggtgtgcgactgggcggccccttctccccccactccagacccctttgggtttccagagcaaccagtcagggctcctgggcagcccccagcccccccaccccaccccaagacaaagagccgcagtgtggacttgctcagggccagccggcccggcgcctctgcacagtggtcccccagccctgccctgccccttggacgccaggttgtgggcggcaaactcgggccgggtggaaggggctgaccctgctgtgaaggctgagctcccactgtgtccctgtccccgccccgccgccgccgccgccgccgccgccgctgcagcagccaccccgcccccgacgctcctgcagggctgcggagccgctgaagccagcccagtaggaccccgaaccaggtggagcccggagggggacgagtctggggtctcctgcggctctggctcagcgacccacagtgtcaccccagggatggcagaccctgcccgccaccctgcgtggactgcacccagccagaggtcactgtgtggtccgcgccccccggctcgggcccggccccaggaccgcacctttgagggagctgatctcgttctggatggctcgcgaggggtccatgtctgcgccggggctgagggcggctgtgccaccaccaggcagagtccagccccgcaccgcactgcccaggccagcgccgcagccgggggaggagcccggaggtccggggcagggcttgccggccaggggcggggcttcagctgatcaatgcgccggacagggccgccccgggcgcatgctcccggccgcaccgcgcacccctcccccccagcctgtggttctggggcacgcgaccccgctaaccccagccagactgccaggtcaccaggccggatccaggagcgctcggacggcccactccccagctccgcagcccccggcccaccccacagccccccgagtccactgcaacgagccatgcttagaacagcctgtgggacacacgtgcgagggccttgaagccgttacccgcgccctgcaggagatacccacccatccagatctcccagtaacttcctcagccggcccaactccagggcctgggctggcaggctgctgagatcaagcccccagaccctggtcggccacctcccacctccccggccccagcagtgtgccccttccccgggcgtctcgcctctgcgcagccctgggtcaggcaccttgtacactggctccaaagatgacaggtccgacctgcaccctggtctctgcctctcccacccagcctcaggatgccccacaggcagccccacaggtcctcctggctgcgccccccagtctgcccactcgccagcatctccactgccgccagatgacactgcagctccatccctcacccaccccccacgaccaccagggacccttcgcagctgctctgatccaaccacccctatggctaatggggtcagcctcctcagcccgcaggagtagctgtgtgtcactgcgcacgcctgggggagcaggtagcactggcagggtgaggtcagctctgcctcactcactgcgctgcagggggcacggaggaatgctgggccctgcccacaccagggcaccccttcaacactggccccgggactgtgctccaccccagtccgtgctggtagtgtggggcaggacagcctccacaagatagaagtgactagcctgcctcagtctccagcaaggcctttcctctgccttcacccgcaagtccttcccctcctgtaaacagacccactgtgcgccaggctggggctggcatggaggacgtgaccatgatccaggagcgaggccggcagctcccacgggtacgagctaacaggcaaagggccagaagccagccccacctccaccgtagacccagcagttctggagtctctcgtccccctgcccgtccctgccctccctgggactcagccagttggggtgtggggagtctcaagaaacaccagttgccaaacttaaggaaaatggtgaagtgaggaattaaaacagaatttcaggccgggcacggggactcatacctggaatcccagcactttgggaggccgaggcaggtggaccacttgaggtcaggagtttgagaccagcctggccaacatggcaaaaccccatctccactaaaaatacacaaaaaaatcagccaggcatggtgtcacacgcctgtagccccagctactcaggaggctgaggcacgagaatcactggaatccaggaggctgaggttgcagtgagccgagatcgcgccactgctgaattcccagctaggttttactgagctgtatctggataaacctaaatttggcctgcaagtgaatcatacttccttagtaaacctcaagtgaaagtgacagatatttataaagagatctaaaaagttcatacatttttaaaaaatgctgttttttttttgttttgtttttttgagacaaggtctcactctgtcacccaggctagagtgcagtggctcaatcacggctcacagcagcctcgacctcctgggctcaagcgatgcccccacctcagctttctgagtagttgggactacaggcgtgcaccaccactcccagttcatcttttaattttttatacagacagtctgtctctgtgttgcccaggctggtctcaaactcctgggctcaagcaatcctcccacctcccagtgctggaattacaagtgtgagccacactgcctggtccagatcaatttttttaatttaatgcataaaaattttcctcagcctagggagacttttttttttttttttttttaactgaggcagaatctcgctctgtcacccaggctggagtgcaatggtgtgatcttggctcactgcaacctctgcctcctgggttcaagcaattctcctatctcagcctctgcagctgggactacggatgtgtgccaccgcaccgggctaatttttgtattttcagttgagatggggtttcaccatgttggtcaggctgatctcgaactcctgacctcaggtgatccacccgtcttgggctcccaaagtgctaggattacaggcataagccaccacgcccggccagggagatttttttaaaggattaaaacgcataaaatggaatgttataagattggccaggcgtggtggctgagcactttccgaggctgagacaggaggatcacttgatcctgggaattcaggaccagtctgggcaacaaagcaagacaccgtctctgcaaaaaactaaaaaactatcctgacacggtggcctgggcctgtggtcccagctctttgggatgctgaggcagaaggacggcttgaaccagcccacccaaggctgcagtgagccgtgattgcgccactgcattcctgtctgggagagagcaagactgactcgaaaacaaacaaaaagataggatcatggtttcaagctaatgagaaggtgagggcacacagctgttcagagaaggaacacacagcttttcatgcaccgactccgcctttaacttcccccctgaagtcaagctgcccgcctgtgagtggccaccatggtcacctgtggtctcccgcagccagaggcttatcgacaagctgcagcagcagcaagttcccatgaaggagcctgagactgcccagcccagcctgcctggaacggtggccacatggtgcagccttggaagtgggggcggccacgatgaccctgggaagggctcagccagctgcacgtcagtcagctctgtggttccttcccggcacaggcttcccaaaggaagggacagctatgtggggacgggccgcaggcagccagcacaggaagagaggccacaggcaccaaggccttgccgtagaggaaacaagtccaggcaacccccaagaaggtggaggtggctgcagccgggaggggggcgcctggagacggggctacagccggggatttcaacaggacaggcaggtcccaggctggcagcgaagggcccacgagcaagagatttaggcagcggggaggaaagggagctggggtagaggaagctgggcgccctggtgacgcagctctggagcgtgggaagcaaagccccggccactgcccaggagatctcatcgctctggccccaattcatggatcacaaaggagtcttgccgaagaagcacgcgggtctgtgtgtccaggccagtgaactgcagggacccccaggctgcagtcgggctcaccagcaccagtgcctccggaaaacccctacctctagcttctgctttgctggtcgaacccagcatggcccccatgcccagctggggtgccatcaggtctcctggccaggtctcacaccctgggcaaagccaaatcctcatgaagctctctgcaaattccccacaccactggggaccccagaaccaaggttgagcccaggcaccacagataagccctccctccttcccaacccctctgtctgggcacagagcaacctcctcttcaccagtccccaggccctggctgccctggccacaggcccaggccaaagaaggggctccaaccctgtcccccacaccacacctgcgaatgggatgggccctcccctgaggccctgcccaccaccaccctgcctgccctcagctttgctccctgccccatcttcacgcccacccacccacccagcccctaaccccctggcagcctgccctgctggggctctctggtggtggtggagcaggccagtgggctgtgacccagtgaccccatgcagaggcgacctgcgacaggcagacaccctgctggcagatacctccacctggggcccccgacaatagccccagggagaccaggcccagtgaaatcctgccagatacatccagcacacactcagccctccggaggcacagacccctgctctgctccccgcctgagcctgcggcaggtccacaggagccacctcacctgccccaggcttctgcctcgcagccttggcccaacaacagcccggcctctgcggatgctgcgggacaggtgggaggagagccttccatgctctggaggccacccctgcgcagggtggggctcagtgcgagctcagtcgggccagccagcctgcaggatttctggggtggagggccaccactgcgggactggatgcccaccagggctgctgggagtcccagtgagggcccaggaggcacagaggtcatctctccgagccacatccttctcctctctcccctgcagcccagtacaagagtatctcaataccaggtgtctgctagagaccaatttgcggggaaggtcctgggtcccacccacatgaccatccattagggggcccatcgttcccaaatatctctcaaacctgtcctgtgcccactgtctccaccacaccctggcctggccaccaccctttcacctcaaagacagtggtagcctccctcgttgcccctcacctccaagcactggacaacagcagccagtgctctccgagcacaagcaggtcccaccacagccctgccgctgccctctggaggccctcctcacgcaggcacctgctctgctgcagcagggtggacctcgccaggcctctgtggagaggcttctcacctgatccatggtggctcccccttccctccctctcagccctccaacaccgagacacctgtgggcccctggggcggctgcctcacccagcaccagacacgaaggtgtcaccacaggaaacatggagcaagagaagaaatgaattcctggagttcagggataatgcactttcccagaactctgttaatatcgttgacttcactagcagattaaaggagaaaaccggtatattgatctagaaaatctcgacagctcatttgataaaaaccagtatttataacaaggaatgagcttacatcgttaacatgcaaataaatgacccttgtagcacagcggggcaccctcccagtgtgaggcgaggctgctgaggggagggcgtgtgagggtgaatgcggacggtgcaggcgcagctctcggtccagcgccaggacatgggacagcatttacccaagtcagcactgctcctcttggcacctgaaacaactcaactcaccatttactggagctcagagaaagttcattgagaggctggcttcaaacgcagttaaaagacccgagagatttctttaggccagtaataacaagttaggaaaatacagcaggaaaaactcttcatcagcacaaaacgtgctggaataagataactgacgatcggtcagagctgatgcagggaacgccccggctccaggatggctccaggaccaggctcggggtccgggatgcagaggcccaggtggcagatgccgcgctaacctgacgcggccgcagttctgctcaccctcccgctggctctgccaggagactccttacacaagttcccgtcagacagcgaggccatgtgacttgtctgaagctccaacaccgggtgctgggcaggtgggaggagtcggcccacttgggcactgctggagggacgacgactgcagtacctagccagcaacttagaaattgtttaaaaattgtgtctgaaacctggtgtggtggctcacgcctgtaatcccagcactgtgggaggccaaggcgggcagatcacgaggtcaggagattgagaccatcctggctaacacagtgaaaccccatctctactaaaaatacaaaatattagccgggtgtggtggcgggcgcctgtagtcccagctactcaggaggctgaggcaggagaagtggaggttgcattgagctgagatcatgccactacactccagcttgggcgacagagtgagactccgtctcaaaaaaaataaaaaagaactggccaggcacgcggtggctcacgcctgtaatcccagcactttgggaggccgaggcaggcagatcacctgaagttgggagttcgagaccagcctgaccaacatggagaaaccctgtctctactaaaaatacaaaattagctgggcatggtggtgcatgcctgtaatcccagctacttgtgaggctgaagcagaagaatcgcttgaactcggagggcggaggttgcagtgagccgagatcatgccattgtactccagcctgggcaacaagagcgaaactccgtctcaaataataataataataataataaaataaacaataaaataaaataaaaacttaggccaagcccagtggctcatgcctgtaattcagcactttgggaggtcaaggcgggcggatcacctgaggtcagaagttcgagaccagcctggccaacaaggtgaaaccccgtctctactaaaaatacaaaaattagccgggtgtggtggcgggtgcctgtaatcccagctactcaggaggctgaggcaggagaatccctctaacccgggaggcggaggttgcagtgagctgagactgcatctctgcactccagcctgggtgataaagcaagactctgtctcaagaaaaaaaaaaagaacttataacagtttacattcttcccttcactaaactttaaaaatcaaaatcgtgttggaatagaaaatattcacgtgactcaaacactgagagtagacagagaagtcttgctcccctcccttctccctgtctccccccacccacacacacagtgtgaaaatcactgttagtggcttcctgtttgtttctccagaatttctttacagaaaatcaagcaaataccatgtgattcttggttttcttccttttaacacaaacggtgaaatcttccgggcaccattctgcccctgctttcccacccaccccacagctggaggcctcccgctctgcacggggaccgtgacccacgtctggccatgcagagcggcacgtgtgggcccagcctctgagcgcactcaggccagtgaccatcgtctgctcggacacacactgcgcgtttgtggctctgacagacgctttctctggcctggttcccacagcttcagcaacagaacctagaaatccagatttttgatttttgccaatacgataggtaaaaaacagtatcttgatgtaaattaaagcttaaattttgaaaaccacttgacccagaaattcctttttttttttttgagacagagtcttgccctgtcgcccaggctggagtgcaatggcgcgatctcagctcactgcaacctccgcctcccaggttcaagtgattctcctgcctcagcctcctgcgtagcggggattacaggcgtgcaccaccacaccctgctaatttttgtatttttagtagagacagcgtttcaccatgttggttaggctggtctcgtactcctgacctcgtgatctgcccaactcggccccccaaagtgttgggattacaggcgtgagccaccgcacctggccagaaattccctttttaacaacagtcatagagatgcacaatgacccagctacaacactgttcactgcagtcatttctaatacaaaaatccaaaattaaactccgtgtcctaggagaaaggattgattggttaaatatgatatggtttccatacaggggaatgctgtattgtaaattaatgtcacagagagatgcccaagctgtatcactaagtaaaagaagttacttatgtctaaaatacttcataacattaaatcatgaaattacagataaattaacacacactaaagaacactgtgcatgcttttttatttttttattctttttgagacagggtcttgctcttgtagcccaggttcactgcagtgttgacattctgggctcaagagatcctcccacctcaggctcccaaagtgctgggattacaggcatgtgccacctgtaatcacgtgcccagcccactgtgcacgctttttaaaacaatgactatggaacaaaaatgtgtaagttctacattaaccaactactgcaggatggctgggtaggtccaatggtggccacaaaaaaatctatgtccatgtccctggagctcataaatgtggccttatttgtaaacagggtctctgcagatataattaaataaaggatcttgagatgagatcatcttggattacctggatgggccctagatccaaaagcaagtgtccttagacgaggagagacacagaggcagggattggcatgatgcagccacaagccaaggggcagtggagttggaagaggcaggcggctattcctaggctcttcccgggtgccttcggagaaagcgtggacctgccgacaccggatttttaacttctggcctccggaacaatcaaaagataaatttctattgttttagggcgccctgcctgtggctcttccctgtgggaatcaaaggaaatcaatacagacagcgagcaggagcagggtgcctctgtgacgaatatctgaaaatgtggatgtggctttgcaattgggtaataaacagaagctgggacatcttgaggcacacagtagaaaaagcctagcctgtctgaccagacggttggtagaaatatgggtattaaaggtgcttgtggtgaagccttagaaggcaacgaggaaagtggaggaaaggtgcttctcacattgaagcgaaacttcgccgaactgtgttcactgtcgggtgctcaacagaacttgtaagcaatgaacttggatatttagctgaaaagatttccaagcaaagtgtggaaggtgtggcttggctgcttcttgctgcttatggtaaagtacaggaagaaagagataaattgaggaaggaactattaagcaaaaaggaaacagcatgggtgatttgggatatctgcagcctatttagattgcaaaagatgctcatgttgggaggttcactgttaggaaagtgtgttctgcagagaaagccatctctgcagagatgaggtatgtgactcatgggtccattcactcatctcaacagaagccaggaatagagacaagattatccagggaggatccgagtgaacccttctctctaatggcctggctccctgtgacatacaggggagacccagaaggtttatgagaatgttttaccagcagaaacactgcctgcttggattgatgggaacagagacaggatgaaatgaaggaaggtattgggcttctgagagtctacaggcaagaaacaggatgacagacccaggcagctgcaaacatgtgctaccctttgagaaaaaggaagaatgactccaaggtcagggccttaggcctagaggcagaggctggcagaggtgcaggtgcagagggtggggcactgagccacagaagagcattcacgggccttgaaaccccacggaatttgccctgctggatttcagacttgcttgggactggcaacccctttattcctttatatttctccctttgggaatggtgatgtctagtctatgcctagcccaacattgcagtttggaggcataaaacttgctttctagttttacaagtaaaaagatggagaaaaattttgcccccatctggatcctacccagagcctcaccaacacctgatttagacacaacttcgatgatcagatttgggacttctgagctgattaaatgttgttcttgtttttttcaagatggggtctcattctgtcacctgggttcagcctccagggttaagcaatcctcctacctccacctcctgagcagctgggactacagccatgtgccaccacacctggctaatttttttttttttttttttttgagatggagtcttgctctgtcacccaggctggagtgcattggtgcagtctcggcccactgaaacctctgcctctcgggttcaagcaagtctcgtgcctcatacacctgagtagctgggattattggtgtgtactaccatgactggctgatttttgtatttttagtagagacaaggcttcaccatgttggccaggctggtctcctgatctcaggtgatccacccacaggcctcccaaagtgctgggattacaggcgtgagccactgtgcctggctaagcggatggaattttagacttagagctgatgctacaataggttgagactttggggcatgttggcataagaaacatttattttggaagtggggcagatgtaagttttgagggaccagaggacagactgtagtgggttgaatggaggtccccaaaagatatgtctatgaacaattccctggaacccataattggtatcttatttggaaaaagggtctttgcaggtgtaattaacacaaggatcttgagatgagatcatcctagattacccagtagggggcctagaaccaatgccaagtgtcttacaagagatggaagagaagccacaggggagagggccacgggaggatggaggccgacactggagtgatgcggccacgagcccaggcaccgatggccaccaggagctggagaggccaggaacagagtccgccctggagcctccgaaggagcgtggccctgtcaacatcttgattttggacatgtggcctccagaaccgtaagagaatacatttctgttgtttaaggccacccagtttgtgggtacgtgtgacagcagccacaggaacctaaaacagggcacattctctgggggtatctgtattctgtaaacaaccatgcattcttgtggcagtcatgacagtggcgtccagctgtgtctcttaggcctatcctgtgcctgctctgttagcttcccaggtagccactcgtttagcaagaaagaagagaaagagatgcactttcaaaaggtcaaaagacacattcatttgaaaaacagagcagaataaaaatcataaaagccacaaccagagacctttactgcagctacctccttctgctcctgcagacccacacttccagccctgaccagccccactcccccaaccaacccccacccccccgcccaccctggtgtgcccctgtggatggccttccccaccctcaccgtcccacttggccccagcccacctgacacaccagcctgcccaagagcacccagactcacaccagccaccctgatgccgtcctggggccttcctttcctgcagcactggccctgggtctgccgctactcctggagccacacagggacacaaagtgatccccatcccattcctggtcctgggtctcctctgcctccaggaagaagcagcaacagtcctgccaagagctgaccaccagctgggaggactcttctgcagctaaccaggacccaaatcctggagagcaggccccacaggctgatgtcccaagtcctacaggatcctgtcttcccagctggcaccctccttccaccgtctgaacgcgtgttcccaactccccttccactgggcctacagatgacccggcccatgccccattttgggtccctgacctcatgacccacggcccctgctctcccagccccgcatctccctacccactgtgggtctgtgggcatcacccatgaccccagcggtgggagatctgggcacctggtcccactagcatcgcccttcccagcctcctccagtcccttcttgaggtacctggcccctggcccctctgctgccagctcctcttgggcctcactggggaaactgaggccacagggcaccactgcccacaccctcccaacagcccaaccctgggaaaatctccagggccctcagtggtgagcagcagtctggactggccactgatgatgtgtggctgggtaaatgtgagcgaccactcagtactcaccctgggccaggtgatgcccatgccccctgtgaccatgcaggtccctcaggccaaggcccagggaactccttccccagggaactcgggccagcatccagctgaggctgtgacctgctgcggcctagcctccatgtcaccgctctgtcctggagagggttctccctccctgccaccctgctggacccaccatagcctggcaccagcagggcctcctgagcacttcccacatgccccctggcacctccaatccgacgacaccccaagcagtcccgctgaggtcccaacacccctcatcacctggtcccagcaccatccaggcctcaccctgctcccaacgtggccctgcttcctcacgccccttcctccttcgcagacccaacaggcccccatggctgcacagctgcccactgctctgcttcccggctgcctcttctcataggcacctaagctctggaggaccccaggctcagagctctggcccgaggcctgccctagtgatggcctcccagcctggcctccccacctcagcccagcatttcctgcacctcagtgtctgcacacgcatacctatctcacaggcatctctgattttatgcacccaaggctaagcgctggctcttccgccctctctgccgcaggcacatcctctccaccccaggctgctctctacctccacagccaccacgggggactcctcagccgctccttgggaggcaccaggccaggatcttgcaggggtccagccagctccaagtccacctatccctcccacccaacgcttgtttcaagccacacctgccacaggacagggcggggctcggctgggggggtacaaaagtgaagcaacacatagtccccgcgtcaggaagctggattctgccacaggacagggcagggctcggctcgggggcacagaagtgaagcaatacacagcccctgcgtcaggaagccggattggtggaaggggagatgtttacaatcatccctgtaacccacaagcccacggccagaccctatgagcgtgacaccaagcatgacatcgagcctccttgaacatctcgacctcagccccaagcaaattccacaaagattaacgacagagatgtttaaaaaaatgcagcagtgctggaagcaactctcagcagatgtttttctaaaagaaggccattttaagcatagcataaaatccagaaatcataaaagactggtgagtgttaaaaattgatatggctaaagaaaccacagacagaattaggccaggcgcggtggctcacgcctgtaatcccagcactttgggaggccgaggtgggcagatcacgaggtcaggagatcgagactgtcctggctaacacggtgaaaccccgtctctactaaaaatacaaaaaattagctgggcatggtggcgggcgcctgtagtcccagctactcgggagcctgaggcaggagaatggcttgaacccgggaggcggaggttgcagtgagccgagatcgcgccactgcattccagcctgggcaacagagcgagactccatctcaaaaaaaaaaaaaaaaaaaaaaaaaaagaaacagacagaattaaacaaaaatagatgcgtggtgtgagacccatccatggtgtgcccagtggggactcagcaggaactttccaggagctgaaaagttctgttccgtgagctggtgctgcccacaggcaacttcgaagtttacgccgaatacaagtgtccctcggtatcagcgggagatgggttctggactccccatggataccagaatccacagatgctcaagtccctgatgtaaaaaggtgtagtagccaggcatggcagcagctcacacctgtaatcccagtactttgggaggccaaggcaggaggatcccttgattccatttccatgtgagcacaggagtttaagaccagcctggccaacaatgcttgtgaataggcagttcacaaaagaaaaggtgcaaatagtcaacaactctaggagatgtgctcagcttaattaataatcaaagaattcaggccaggcgcggtggctcacacctgtaaccccagcactgaggctgaggcaggtggcttacttgaggtcaggagttcaagaccagcctggccaacatggggaaaccctatctctactaaaaatacaaaaattagccaggtgtggtggcgcacacatgtaatcccagctactcggcggacagaggcaggagaattgcttgaacccaggaggcagaggttgcaatgagctgagatcatgccactgcactccagcctgggtgacagagcgagacagagcgagacttcgtctcaaaaaaaaaaaaaggaagaaaagaaaacattggtgtaaagcttcatgacttggattagacaatggcttcttaaatatggcaccaaaagcacaagcaaccaaggaaaaagatagataaactggagtcataataattaaaattaaaatgtacgtgcttcaaaggacaccaccggccaggtgaggtggctcacgctgtaatcccagcactgtggaggctgaggccaggagtttgagaccagcctggccaatatggcgaagccccatctctactaaaaatacaaaaattagccaggtgtggtggcagacgcctgtagtcccagctactcgggagcctgaggtacaagagtcacttgaacctgctccagcctgggtgacagagcaaaactccatctcaaaaaaaaaaaaaaaaaagacaccagcaagcaaataaaaaggcagaccacagaaacagaaaatgtttgcaaatcatatttctgataaaggactggcatctagaatatataaagaacacttacaactcaaaaataccaaaaggtaaattctaaaatggacaaaggattgaaatacacatttctcaaaagatataaaaaatggccaacaatcacaccaaagtgttcaacgtcattagccatcaggaaatgcaaatcaaaccacaatgagattccactcgacacccactaggattggatgtctgcaatcaaagagtcagataataacaagtgttggtgaggatgtgaggaaattggaaacctcgcacccggctgttactgggcatgcagaatggcacgcccgctttaggaagcaatctggcagttcttcaaaatggttaaatatagaattaccacacagctgagcaattccactcctaggtatctacccagcagaaataaaaaacatacgaccacacaaaaacgtgtatgcaaacgtccatagcagcctcactcataacagccaaaaggtggaaacaacccactatccgtcaactgataaacgcataagcaaaagtgggcacttccacaccacggaaccgactccagcggggggagggtgaggtgctgatggcgcggcgatgtgagcagccctgacagcgtcccggcaagtcgaagaggccagacccagggccagtacaggccaatccataaccattcctgtctgcctgagcccctcagcccccccattctccctgtcccccatccagggcagattcctctggggctgaggctactgcagcctgtggcaggagagctctgggcaccctatgggagaggcctccgtgctgagggctgtgggctggtgacttagacagtcggcccagctgccaagaggtgtccagtcgcccagccccccaagcctggcctgtgacagctcatagaggctgggccgtcctgccacaccatgggagcctggagagagacctggggtgggtgtggcagggcggggacagttctaggagagagttgtggcaatgcaggtgagtggaggtgaggcggtcagtgaagaaagaaagagcggcccagcagcagtccagcgttgtgggcaggggcctgtcctgggggtcagggcatgagtgcaggccggggagtggggagtggggccagccgggggcctgggcagctggggatagagactttaggttgtcatgttagggatgggagtggggcttaggggtgctgtgaggtggtcctggagagggcagcaggggtgagaatgaggccggggtgagtaccgttggtgagtgggtggcgttggtgtggggcaggggccaggggtgggaggcctgcattggtctgggggaaaagcgggcctggagaggggctgggtgtgttgggtctccacagggcgtgtgcccagcctgtggcctgcactctcttcaggaccccttgccagccctgggcctgcccagtgccactgtgcctggccccctcctcatgtgtcccctactctcccctgtcctggactctgagcttggttatctgtgtccctggcactggccccaggccctcagccagcactgcagggtgtttgcacgggtgagtgggtgatggcgtagggcgtcatctgcagtggttggtgctcagctggcagagggcaggctggaggttatttggggctcactggagaggaattttggtcggtgtttactgtcaaaagtaaaacgctccaaaaaaaaaaaaaatcaagcagggtggaagtatacaaagaaaaacggggagagtcacacctctgggttcaggctcccggctggggcgatcgctgtgcatgagagagggcgggagagagcacacggatttggccgcccctttacagggagctcagactgagatttcctctggagccactggcttttcatgtcagtaccaattaggttgacctcatgctgattattagtattttttaatagctttattgagaggtaattcacatgccacaccattcacccattcaaagcgtccaattcagtggtttcagtagattcggagttgtgtagctgtcaattccaggatattttctcacccagcccctggcaacaccgctctcttttcagttatggactggccgcctcacctccactcacctgcattgccacaactctctcctagaactgtccccgccctgccacacccaccccaggtctctctccaggctcccatggtgcggcagaacggcccagcctctatgagctgtcacaggccaggcttggggcgctgggcgactggacacctcttggcagctgggccgactgtctaagtcaccagcccacagccctcagcacggaggcctctcccacagggtgcccagagctctcccgccacaggctgcagtagcctcagccccagaggaatctgccctggatgggggacagggagaatgggggggctgaggggctcaggcagacaggaagttggcgatgttccaagcggagcagtggccgcctgactgtacagggaagaccggggatttccaggggagagccagggaatgacgtgtccaggggagggtctgagacgttgtggggtggggggtgaaggtcaccggagtgagggtcagacagggagttgtctgtgagagggcacagtgaggtggaaccgaggcaatgccacagaggggaggaggccaggaggcctaagccagagcacctcctcagtgcagggatcagctgggcagggggcacaggcctggcctccctgccctcctcagaaccaccaaatgctgagctgggcccaggacaggggcccgcagctgcttaccatggagggatttggggctgccttgccgtcactggctggctggcaaggggtgccatgccctcccacagtccctccaccccagggacaggaagggccggggctccagccctctagcaggtccaaggggctcacagaggtcaggcctggaaaggtgtagggcacaggggccacctctgacctcctgcaggccctcctcagccttggtccgtggctcccagacacaggtaccagcccagcccctcccgtccccttgtctcaagccaggagctaaggagacttggggtacctggtgtgctcacggagcctcagcacctgccttgctgtttagccactctcaggccagtgccacacacatgcgggcagctgcaccatcacgtgacaactccacttcaggcaagccccccggcccccctgccccctcaccagcctccaccaccaagcccagaaggcagacaatgggccaagactgcgagtgtgcccaacaccaatcctggcctccagaggagctgcgcttgggagggaggaccctgacagagggtcccagcaacctccagggatctgtctggctcacccctggatgaatcagaagtagttcccaccccaggaggtagaggaaagacagccctggggccaggaaagcctcagcacaatgcccagaacaggctggggcaccccaggcagcccagcaacctgaccagatgaagaactccaggaggaaacgatcctgcacagttcccgcactttgaacagagtggtcagctcagaaacagctctgtcctggggcttgccaggagggctggagcccaggtgggcggctgcttccctgccctataccccagcacccctccgggtgctccctctaaggcagggccggccatgtagagcatgagcaacaggctgcccgctccaggcctccccaagggtgcaggagtgtctcccctggcccgaatgaactagtcacacaggcaaagcggctgggcacagcactgtcaaagagagccacagcagtacatccaccctgccccagagccgtcgctggaggacgcctgaaggagatgagttcggggcaccatgaaacctacccagctgggcaaggttgtggtggagagcggcaccacggggccccagcaggacctctctccctgagctgcccttgggggcagagccagcaaaaccagccacgtggagctggagtctgctctgatcggctctgcctgggggcccccaccgcgaccctccccagcagctcagtcccttgctcctaagcctctgcaggccggcagccaatgctgtgtccacaaccgcctggagccgggcgacccaggctgagccaggcagctgggctgcaagaatggccggtgggaccaggacctgggagggtccaggggctccccgtgggcgtggactagggcaagggggtctgccgaggcatcaagcaggtgggcaggccactctgatgctcccctagagaggaaggaggggccaccctgacccctagcccacagctgtcccctagtgaacagagaaggggtgtggggggggtgccctgccaaggaagggtggcagcccaggccctcgccagtttagggaggtgaggagaggcggcaactatgtgacccattgccaggcggcggagctgcccctgttccatgcagacgcgccccagaggtggggcaggggatggctcagccttgacccatgtgtctgctggccacagacaccggatcctggctcagacagccgaccccgacaagccctgagcgcccccacccgcccgcggcccaccccacccacccgagccgcgcgatgccctattaagggcatggcctcgggggctcagcggagcgagtcctccccttccctaggcactggcagccgttgggggcgatccaggcggacgaggccggcggagtggccgcgctcgggccggcgatcgggaccgccaccgtggacgacaaggtgctcggcggctgggctgtcaggagcggcccgacaggcagcgggacggggggccgtacctttgtacttctcgcgcacctcctcgtaggcctggatgaagtcctgctcgtcgggcagcgggccggccatgccggcgggcgcggggcgcggggtgcagcggagcctccagcacccggcggccactctgtccccgcggccgcgcgcgccgcttaaagaggccgcccccgccccgcccccgccccgcccccgcacccaggatgccccacgggcggggcggggccggggccgccgcggccgggcagagggagccgcgtctgggcccctcccggcgggccggttccgcgggctccgagtcccgcacgcacgccctttcccgttctcgcccgggtcgcggccgccgacaccgcggtcgcccgggggtcctcgggtggcccccgcccaggggcggccgcgacctgtctgttccccgccgggccggcgacctgcctccgagacgctcccctgcccgccccccaccttgcttcctgcgtgcagctgagaactttcccattgcaacattggagacgactgagtcggtataaagaacccttaaaacactacacacaagaaaaattaagtacacatacgaggactggaatagcccattcacagaaggaaaaaatgcttggtgataattaaaacaactctttccacccatcagattggcaaagcccccgctctccccgccttcaccaatgtcggccaccctgtctgggatgcccctggccgtgttttctccaagcttaatgccatatgtcctgtaactgcaagtcccgcttccaggaatcggtcctaaggaaaccgtcagaggacgcagagccccggcgcggaaggtgctggctgggggcaaagcctttgcagtgagtaccgaaggcaaccacggtcagccggggcctcgggaccccccacactcctccacaactgtaaaggtgatgctgaagaaagcccaggcgtgggaacgacacaagtgattccctttcaagtgggaagaaagtgacttctttctttaaagtccgtgtgtgctgtgaaaagccctgaaggtcatgcagatggaaccagaccctggggctggagctgggtgcacagcagtgaccctctccttccctctttcctgctcctaccagccccgcttcccgtcgtctgcaacatccccccagggctcagcacctggccttgcagccctctcctggcctcccgcaggggcctccctgccctccggctggaacaggtcaggactctcaagccaaagcctagagagctactgctcctccctctcctagcacagctctaggtcacccacttccctcctgccctcccccttccccaagcatctcgctggatgcttcccatcgttctccctggatggggagctactggaaagcaaggccagatcctggctcaggaagaggctggggctccagacaaccaggtaccccctccctatacactgctcctgtacattcccacctggccgccattgtggcagccaagaccgagggcctggtggggaacccaaaaaattatccttgttgcatctgggcactggaccgtgttaaaatcaaggatggacgccgcggcaagaagcccaaccccaggcctcatgaaccgcctgggcgcggccggcaggtggcgctgtgccgcctgcactcacctgggacgcgcgaggccctccgtgacccgcagatccccctaggcctcccccacccagtccccgctccagcgcctagcacgcagcgggaactcagtcaacctcgcgtgccaaggaggtgcacaggcaaggccctgcgcagttacctgcgatgcgaatgaccgcccgctcagctgggtccaggacactcccgttgctcccagcgccacccccgctgcgccggctccgctgcgttttcccaaggttccagggcagtgtgtccccagggctgggcgagccactgcttccattggagacatcttcagagactgcccggacctcagcgtcctcacccgacatggcctcctggaaggggagcaggaggggtcacatctctgcctgttcaggagtggactctgcacgccgacccacccaccaccttcttaacctagacactgaactctccccacccagcctctcgcctggacactggcacccacacccctcctgcactctgctgtacccacatattgacccccatgctctggccccaggcactgacttaccctctctccatccatgactgccttgccccctcccgcgcactcctcagatacctacacagtgaccccccagccactggccttaccctccagtccatcaccaggacactgaccaccctggccacccccactcccacacactgactgccactctcctctcttagtcacccacaccccacccacctactctgtcacccaggggctcaaccggcacacgacagaccaccttccactctgtcaaatggaaggggaaggggtgactaccttcactcagatgccggcctccactgcctccatcccaaactggacccgcctctaaccctctaatcgcaggcaggcgaggccatcaaggaaagctgaccaccgccccctccactcaccgggtcatcagggaaggacacccaagcccttcccctggacaccggcagtccacctccaagctctctcgacctctaggactccccatcacgccaccccacctcagcccgcagtcccacctcgatctccgcagcgaaggcctataaatagctgcagccgcagcggcgtgggccgcgggagctctgctgcagcgaggccgggagggagcccgggccgcagctccagcggcccacagtgggggcgcgtacaccggcaccgcggacgcaaccaggacgcacgcatacccacgcgcgcacactccccagcccccgtccccaagagcactggcgtgcgggaggtgaatggggctctgtctcggagggggtgggctggcgcgggggcacaatgtgggctctgtgcctccgccctcaggccaagggctaaggaggaggcagcggacaccgaggagggggccgccgcgccccgcccccactggcttctccacgggccgccccggttgcagccccccgcccggagccctgcggtcagccgcgcctccccagcggcctttcctgcccacaccccgggcaccgcccgtccagttccgcagtctcgggcgtgcagggaggtgctgtcctctcgagcgagggcaggagggggcgcggcgcagcccctagttccgtgtggcctgcggccggagaccgccccccgacccccaccccgcagcgcccgcacgcggcgcgcctctccatcctggccgcggtcatacatgcctggtggctccgctcacttcagctctgccgccgcagccagactgctcgggccgggagagcggcggaggcggcgcaggcggggcgagccccgagccccgccccggcccccacccagagctgcgccgcgcgggcccggccgagagcgagcgaacgctgccagcgagatcgggcgcccgtgtctgcgcggggccgccgagatctcgggagcggcggggctggggcccgggcgggcgattcggccagggcagcggcgcacacctgagcccccggcgcacggggcgggccggtagtcaaggagacgctgtctgcgccggcgtgcgcgacacgggaacgtcgtgcgctcgccccggtgagctccgggccccgccccgcaccccgacgcctcctcggaagcagcagatcccgcccctgggccgcggagatccccactccccaaacagaggtcgcagtcagagttcccgggtcccttccgcctgggttcacgttcacgtttattcaaacaacagagccgactcgggcgaggtctgggagcggcgggcgggcggtgtcgcctcctgggctctgctgacccctggtggtggggtcggcccaggctgggacctagcccggcccccctcggccgctgctgaccgccatcccccacaccgccttctggagcccgcagagggaggcaggggcgtccccggggacagctcaggcggccacagttgggggcggggagcatcagcctgtgcggagctgggagcctgggaagcaggaggccagagggtggccccttcggttaagtgtctggggagcggcccgggagcccagaggggtcgtcgggggaagcgcggggcacgtgctcgcaggtgatgaggtgggtgggcagcgcctgggtgtcgtggaagatgacgaagatgctgggctggcagatgcagtccacggcgctgtcgtagcgcaggagcacgtggccaggaccccgcagagggggcgcccgcagaccgcggcggccctgcccgtagtcgccagtcagcacccgtgccacgaacaccgccttatggccatcggcgttggggggcgagtagcggtcctgcaccgacagggaggcgcgcctggcgaaatacacgcccttcccgtagaccgtggctgcagggcgagacggggcaaggtcagggtggtcggggtgcgcagagcccccgcccctgcccggctcaggcctcaccgttgcggccgcagaagctgcggttgaagccgtgggcgcagatgtcaggcactgccggtgccgtcgtgccgtggtacagcacctgctccaccgggcgccgctcgcatcgctgcagcaggcgctcccggtacagctcatactgctgctgcagcagcgggtgcgacacgcgctccacctgcggggaaggcccgggccaggattaaacaccctccctacgccctggggccgacgcagggcagagctgagcctggcaaccaggagccctctgttggaggagtccagggtttgagggagcccttgcagcccccatcatgctctgtccagcagcagacagtaaca

SEQ ID NO: 470 - DNA, 61113 bp, Homo sapiens
  source 1..61113: mol_type = genomic DNA
ggcagatggcagaacggttctaagcatccttttctccccctcgggctgcccctccctgaaaagttcctaaagttcaaaatgtcagagtcccccagagtgttctgaggatgcaagagtgtttgtaaaacgtgctctattttcgatttcccagattaacacaactggattctgaagaggggaaaaaacaacctcacttaacacgtctttctgaaacaaacccatcaggagttcttttaaaaaaaaaaaaaaaaaaaaaaggaactgaaatgctggaagcaccctcaaagggaagcagacgcctgactttcacatccaccctctcatctgactccaggctccttgagctggcggcaggcccgcaatcccccgttccgtgcccagatgcacttcggaatatagaacagctgggacttggaaagataatatgtggcacccacctgctgtaggttacataacctcccagcagggcttggggcagcagccggccatcgagcttatttgcatttctgcagcaaaacatgaatattcacacaagtgcgataaataaagaccatcaacagcctcatatcagttcaagcgcaattttgccaccaatttgattacgaaaaatctttcgggcttccagggagctttggagcctggaaattgcagatgagggatgggggcctgcactgtttcgcggctggggagagggagctcatccgaagtcttccgacagaggtgggcgtcatgcccgacgctgagcggagtgggtctcctcgagcccaggctccctgcgggcgctgtcctcagcgagcctccccgcctccgcgcccggggtcgtacctgcttcacgatctcctaccgcggcgggccgcgtacctcctggatggcctcttagacgttctctgagtcgctgcgcgacaggggcagcaggcacacccaggagcccgctacgctgcaggccttgaagctgccgctgcttccgaggttgccggcgggaggcgagacgacggcgcgcgtcaggtcgtccagggactgcgcgggccgcacgggcgccgtgggccgcaggtacaggcaggcgggcaggccgggcgccaggctgctgcgctggctcgcggcgccgcgctgcgcagggccgcacagggagctggccccgcctcggggctccgctggggggccgttgggggccgctgccacagccgcgctcacgaaccggtagtcgtaggcgagcggctcaggggctgcgggtcccgatggggggacctggcggcgcgtcagcggcagggttgcccagcgcaggcagctcgcgcacgtactgcgcgggcaggtagaaggggcggccgccgggcttgcgccgcacgtgccaccaatgctcagtgctctgtgctgcgccgcagcggccggtagcgctcattgggcgggatggccacgcggcgcccgtccttgccggtgtactcgaaggggtgctccaccagtacgtacacgtccccctccacatccgccgccattgcggccgcggcattttcctgcaggcaacaaggaagagggccgcggaagtcaagaccactgagcccggaatagcccagcactcgaggagagacttgggttcgagtcccgatgctgcacttgccgttcgccttcgggcctcagttttcccatttctaaaatgaggacttgaataaaatcacatgcaaggcttccattcttacactcagtgctggaattaggacaacctcttcattccgtggggttgattctaagatttcagcctcgcttcagtcctgcggtggggagattgtgggtagtcttggtccaaatcgactgcgagggaaactttggctttaaaacgaggggtgattacctgctctaaggtcgacaccacgcttgcttgatagttgaccgtgccttagttttcccgtcagtcaagtgggaagagcagcccatttcctgccgctccccgggccctgtcccgcctggacgcctccctccaggagcctgcgccccggccccggggtcagggttgggatgcgggctctgcaggcgccccggcgaacagctctacctggaggctgtccctgccccgcttagtccaagggccttggtgtgggggcctccgctgtcaaggcgggggaaccggttctctcggtttctctccccttccccagcggcttcaacgcagacgtgagcccgagccgggcccgcccccgccccctgctctccggctctcacgccgccccccgagagaggctgcccacctgccctgtgacccctacagtgtccccaagagagtggcccctggagaatgcactctgagacagtgactgtccgtgcggagtcccaaagcaggggccctcaaagctctccggagtggtcacaagccccgctcccgccccggctgggtgtgtcagggatgggggagagcttaactaaatctgccggcgcccctccaccaaagccatgagtcggtggtcttctccggaagtgcatggcccctccaagctcccacactgaccacatctcctcctgcctcctaaggtgacccaggccaagggccaggagaccgcggcttgccgaggctgagggaccgaaggagcagggtccaatccgggactcccgtagggctccttcgccactttgtcaagcgttcctcgactaggaaagggtatacacttgagtcactaagcacactgggccccggaggcggggtcatcgagctgcccagagccaacaaaccccaaggtggacactgccccggcgccccttccccccggaccccgcagcgcactcacgtctgctgggcgggcctcagggagcccaagggccgggtgggcggggccggcaggttaggcccggaccatcgccctgggcggggcttccgaggtggtgccggagaggtttcgcggaatcggagctggcaacggcagcgaatagggacagcgacgctcaggagtgctgtcacccatacccaaagaagctgcgtctgggcggggcgaggaggaacctgaatgcctctgctggggaccttggggggcattgggacgaggaccggagcagaaagccggggtccggagccaggaaggctgcgtctgaaggggcgctggctggtcgctagcggagcccaaggagggtgggcctcccctgtcccgccttcccccttcccttctcccccggggatttgctgtcccggagtccctgcgtccctcccgcctgcggctctgggaatgccggtctggggctggttgtctagtgcgggcgttcccgttcgcggggaggtcattggcaccctgaatcacccactgcgagcccttccaaccggattgtagacctgccagctccgggcccacctcccccaacagggcctttcccggagcaacccggccgggcctggaaaaactccgagagggattcccagcgcagggacgcccaccggagcgcagtgtctcgggctggataagaaggggacccggccacagctccttcgccaacctgcgggaacacagagaaggggagggattggtgggggccgagaggatccctggagcgcgagagcgcacccgtcgccaggaggtcccctgcgtccactgcccaggcgacgcaagctacagcggcgtcaacgcctgggtcggcgctaggggcctgggcctgctccccacccgcctccagagggagggcagcccttcgcctaccttctcctccccgtgggatgcggcccgagcagctcccgccccagcacggagacaaggggagcaggcgcgcggagctcccgggtgcggacccgccacctgccgcacccttccctccccaaccctgcccctttccccacccccaccccacctcccacctcaactcccgctcggcggcccactgcctgcccgggcacctcggggcgtccgctcgccggcctcgtctccacttgtcccggcaggcgcgcgtgggctcggcgtcccgcgctccctcctcgaccgcgcggctccggcgctgccaggtttcctgtatagcactataaccagtgaggcaccggcggagagcgcccggcagaacttcctcccggactggggctgggctgcggttgcgagagacaatccccggcgtcctggcttcctgtcgcctctgggccaggcccgcgcctgaagaggaaagatgccaccccctcccctgcatttcccgggatcctgggccactcccgggatcctggctgtctccagggaggaagaggccgcggggctgagatggtgggactggggatggcgggagtctcccgcgcagcttctcctggccagattgccttcccaccatcccccactccctcttgacccttgcggggaaagaggtccaccctccaatccgtccacagggtaagctcagaacaacctcctgggggccaggagtccagccccagggccctccgccttgggggtcttctgtttgggaattatctgcctctctggacaagctgcctcgccctgatctgagcctgcgctcactccacacgtcacaaaccacagccctagcagaccccctgccctcaggggcccccagaaacagttgtgcctatggacgtggctgtgtgtgcggagagctggctgattcaggccagtgttctgggacgaagagaagcccacaccccaggccatggcccctcttgactccacctcctgggggcccagggttggatgggaagctgaatctggccacactcgttctggaactcccttacctctgtatctttgcccctgctaggcgttgcccacccgtgagtctacacttcctctgagaatctcagtgtgtctgaggcctggtggcactttgggaccctccagggtgggcacacagcagaactcagcattggtctttggtgcccgacatgcttagaaaatagtgactggaggaatcttctctccctccctaccttttaggtctctccccacctgcagcacagccaggcagcggctggcagtggtgatggtctttgcgtggggtcaggcaggtatgatgccccactctgctgcttggcggctggtaggccttgggagttctgccttatctctgcagctcagctttctttcctatcaatagtaacacccacttcactggattattgggaagattaaatgagatccactaagcagtgcttaccacatgcccagcgtacaccatatatcagctatttttttttttttttttttttttgagatggagtctggctctgtcgcccaggctggagtgcagtggcacaatctcggctcactgcaacctctgtctctgggttgaagtgattctcctgcctcagcttcctgagtaggtgtgattacaggcacccaccatcatgcccagctaatttttgtatttctgcagagacggggtttctctatattggccaggctggtcttgaactcctgacctcaaatgatctgactgcctcggcctcccaaaatgctgggattacaggcgtgagccacagtgcctgcctatatcagctattatgacacttttattatgtgatgagctcttggggtttggactggaatctccaaaccacccgtcctccttcaggcagaagagaaggggaagtcccagctactcgggaggctgaggcaagagaattgcttgaacctgggaggcggaggttgcagtgagtcgagatcacaccactgcactccagcctgggtgacagagtgactccgtctcaaaaaaacatgggtgagaaggggaaacaagtgccctcagaggcgcttggctgaggatggagaggggctgagcccactggcagggcagaaccaggtcatgtgccatggccctccactgggcctccctcccccagtttctcttctcttctctggccctaccatctattgtccttgggggaagctgtggcacctagatgggcagagggtgccaacttgtaatctgaaaggggccttcaaggacaggaaatcgcagatctgaatgttgtctgtttccatcccattttaccgcaatctgatttccctgagaattagtctgtttccaagggcgccttcgggaagaatcctcacaggcctaagccctccccaggccagactcctgcccactcagggatggggcaatgagggctctgaccaggccaggcttgtggtcatggcaggtgcataacccagctcctggcttaggaggtattggcatctgggcacaggtgtgcgccatgaccgggagaagctatgcacagcctccacctgcctgccaccgccacctctgttctgcacaggcatccagctccaaagctgggtgggtgactcagcagctgatcacccccagggaggggtgggggtgggctcatctctgacagtgacaggtggatctccacctgaggcctcagactccaagctgagcgcaggtaagacagctaggactgagggcccgctgggtccaggagaggtgggagaaggcgacagagagaccagcaaacccacatttccctgaagcctggagggtctgaacttcacttcaaaaacaattccaggctcccaccccagcaccaaggccccttcaaaggcagtcctgctccggggaagttcttcagtctccagtgtcctggctgggcaagttcagtgatgctttgggaattcatagctttgtgaggcggcggctgcatccacagggcagctcccccgcatgccctgcacagcttagggcgaaggaccaggtcatttctccacagtgcagggcccagctgcctgctgtctctagggtcctgcctatctgtgccctggcaggggtcagtcaggcagagagggtgaccccgggcacccaccaaggtgggcctggagcatctgcagcagtgcccctgtctgtagaggggtgaggagggcacggggattgggggtgggcaagacggcgaccctccctaaaccgaggagggctcatagtgctgaaagtgctggtttccagtcatttctccttctcctaatggggccaaggccccaggctagagaagagctaggggctctgacgctgagaaaggggtgggctcagcaggtgagacgcactggggtggggagtaaagaggagacagagaggaagtggggtcaccaggactggccctgccctgctgaggggcggtttggcactggcagtgagggccaggaaaggcactgggtgggcccacaggccctgtcccagcagtggcctgcccaacagccacccgctgcctctaggacaggcctgagaggctcctgtgcatccgctgggggtgaaaatgtctggatttcatgggtgactcgcatacggtcaagaataaaaaatactttctgttgaaatatgaatgggaaaaacccaccttaaaaaaccagaccttttaatcaggaatgtggaattgaaaatgttccccaagtcccctttccacagtgtttggccagccctaacggaggcgccgggacgctggtgagccagggcctggtgagtaaacggccctgcctgccccagacagggagcatctggtggtggccacgcctcctgcagcagaggggtggggggagggccaggggacatcatggggacttcctgggctttctgtaggaggccagtgctctggtcacatctgaggtcttcctgacaaggggacacagctgtgacacggtgagtatcctgggctgataggaaacccagctgggatggctgagccacactcacccccggccttcagagtgggatcagcagaggggcatcaggcgaaaacgttctgttgctggtacttgcgtcagcgagcacagcgggggcagcccttcttcaccacagcctggcagctctggtggaagacggtcttgcacttggcacacctggggagagagcagcacacctgctggtgccggctgggctggaggttgacctgtggccacgctggccagcacttttgaccagaacccacgatatggctgtgacatactgtgtaacccatgcacgcacgctgtgcctttccatcccggaacaggagattctcgaaacagtgcttacccatacgtcacacaatgcacactgatattctctgtcctactgcattttttataaatgctgcttgagattcattaaagatttcttacctgtattttaaaaagcatttacttatttatttatttatttttgagacagagccttgctctgttgcccagactggtgtgaggctcactgcaacctctgcctcccagattcaagcaattctcctgcctcagcctcccaagtagctgggataacaggtgcccaccaccacacctggcttacttttgtgtttttagtggagacggggtttcaccatgttggccaggctggtctcaaactcctgacctgaagtgattcactcgcctcggcctcccaaagtgctgggattacaggcgtgagccaccgcacccggccaagactgtataattttaaaaactcactcccaggcccattcagggctgaatcccggccagtggacaccgataaaaaaagaactaatgttcccagttcagttttccactcccacatgggttgcaggaaggtctggatgaatttttccattgagaggttgctgataatgagcaataactgggaacaagagggatcatttcagcaaccgaggcagtagcagtggcagtggcagctaccacccaccaggtgcccactttgtgcctggtcttatgccaacagtgcagggcggtaactcatacaaccctcctcaacccatgcatacactgagaccccaggaggctccactcagagagccggcagccacctcttctttaggaagacagatggttctgtagaggcagaggagtcctgggagagcttgtcttgccccctgaactggtccagagctggccatgactgcccagggcgtgggctgccctgaacaactgcaccgccccttggcacggcacaaagcagatgttcaatacattcctgcccatagagcgaagcctgctgccctgcgtgcttgggccaggctgtgggtgtggcgaagggtagggctgggaggcagctggctgggtgtcccgcatacctgattgtggtgtcaaactcagaggggaagatgatgtcgtggtgctggcagatctggcagatgaagctgcgctgggtgcacaggtcgcagtggtagacatgctgggaggcaaattcaatcagggccttgaggaatccttcatatacctcatctgcgatctgcggagggtaagtaggaatccttcatacaccccgtctgcgatctgcggagggctggtaaactgaggccccaggcctttcaagcagctgcactgagtcgccatggcaccctgcctagagaacttctacccccagtttccatgcgggcaagaaaagaaaacctccctgaatcaggctgagtagtggcagcatccagcccgtgggtactgaggtcactcggggcttatgggatttatagatgagacccaaatccactgtaccctccccttggggaaaggagtattccaaactctcttccctacgatcctggggttgctggagttttatttcaggggtgctgggggtatccgtccctgcccaggaagctggggcagcagggcaacccaccctgagctgcagaaaagctgcagactgctgtcttcttcagtaaactacagacaccctctctcccatcttccttgctgacttctccaggaatgaagtctttctagagttctgggcggggtaggcatgacactctcacctgccggaggtcagcaacacggaacctatgcggagactccaagagataattccggtggttgagccttcaaacaaaacacaagcgattctttagaaaagtttcgaagacccaggccagcccgtgttgtttattttcattcccctggcgctgctcaccaggcagacacctcccgcctgggcggggcagggcctaggagcacaattcagcctgcttgggacccggtcttcaaggtaactaactagctggttggaccttggacatgttacttaagctctctgaaccttgggttcccctctctgggaaatggagttgtctggattgagtaacttattgaaagcatttggcttggtgcagagctcacagtaaacatgtaattaattaattaatcatgaggaggataggtgctgacatctgggaccaggaactgggctaagagcttcatacgcactcattcatttgatcctcacaataatcctgtgaggctggtactaacacaaccccaactttgagaagaggaaacagagaggttaagtcacttgcctgaggtcacatatctagtaggtgggagagctggagtttgaacacaggggcctggctcctgagcctgcacccttgtccacctggtaaatgcctagagatgcaggctgttgtcattattgccaaagtcacataccagggacagtgctggggacagtaatgcacaggatatggcctctgccctcctgtggcccctggtttggccgagggacagacatccaagtgtctggtttcagtgctacatgagagcaaccgagacgtgtcctaagtacagcagtcccatttcagaggtggcggggggagcagaggacaagggctcagctgccaacgcggctctagtttccaccacaccaacggcagggatccagcgggccccatccagagagatggagaggaaacacttgcagaaagtcccctggtacaaaacctgcctggcctggctgtgtgtgtttacatgggtactgggggtgggaggttactccaagtcagaggatgcttgggaacctgccccaggatgccccagacatctggggacaggatggtgccagccctgggtctgggcctcccaggtgcaagctgtggagcatctggaatggggacttggccttgtcccagctagtggcctcagctgtggtccaggggagcccaatctggggtggagagggtgagtctcaccaagcagccacacaggccaagatgccaactggcccctcagtttaccatgctggtgaccccagtaaacttcctacactctaggaagggaagctgccatttgtcaccaagaaaacatgggacacagcgggctggggggacacaggttggccctcagctggcaggagggtgggctgatctggatggagaattagctttgccatctgtcctctgaccacagtcgtggaagccctgggagcccctgtgccctgggcctgtcaccctctcagcaagggcttgtgactggcttctccacagtgctcagtcaaggccagaggggagagggcgccgacccaggggtgagaagccacttcccctcctggcttccaggagagaaactctcatgcaccagggcacagtcagccctacttagggcctcagtttctccgcccacacaataaggagaacctctttgtcctctggcgtgaggctggctacctgggaaacagaccagaggaatctggacggctctccgggagagaggaagatgaggggaaaggtcgactcttagctcctggaaccgatgaagtgatggggaaggaaagggtcaggcaagggctggaagatccgggggacatgggtggggggcctgggtgccacctgtctcctgagccctggctcctcctctgcccacccctccccggctgtcgggagggacagccttccctctggctgactcggtccaggcccagctccctgggctaattactaacaccagctgccacccagggctctccccttcaccaactgcactccgctggggccagaatggtctttttgtgtgtttgttttgtgtttttgagacagagtctcgctctgtctcccaacctggagtgcagtggcatgatcttggctcactgcaacctctgcctcctgggttcaagtgattctcctgcctcagcctctctagtagctgggattacaggtgcctgccaccacgcccggctaattttgtacttttagtagagacagggttttgctatgttggccaggctggtctcaaaatcctgaccgtaggtgatccacctgccttggcctcccaaagtgctgggattacaggcatgagccaccgcacctggtcttttcagagtggtcttttctaagccgctgaccggaagtgacagccctgtgctcaaaacccttcaatggttccccacaggtggcagatcaaatccaaaggcctcgagggccctttgagttctgggccctgcacctgaagcccagctgcccagagcccctcaagggtgtcagtgagctgtgctcctgccagcctcttgctaccggtctcttagccaggaaagccaggttctcccctgccctttctactcttttctcatttttctaagccccagttcaacagacacacaatgccactggtgtggcaacatgtgtgtgtggatggagtgaggtgcagaagcaggtggtggtgggctctgagaagggctgattgaatggtctgctttattccctttcataaattttcctcgcttggaagattgacctttgtaaagaagaaaaacattttagaaggaaaaaggaaaatatctctgcatgccctcagctcagatgccatctcctctgggagctcctctggcccctgccaaggctggatcaggtgccctcagggcacacacgatgctgacccagggccatctgtggcccagactctgggtccctcatgcagccctcaccactgctcaggaggccacaggaacagaggaatcactggcccattttatagacgggaaagctggacccggagaagtgaagcaactttcctgactcacagtgggtgagggcctcccacgctctttcccctgccccatgctgtttccatgggacttccacaggcatgggaagcaggctgagcacatagcaggagtacagcgctgctgcccagggatggagcaggagggtcagggagagagagacagggctgcccctggtgcccacagagacaggtctgtaaagccgatgaacaaactctctcagcagggcagggatgggtgaatggggctggggtccacaacccaccccacaggcatctggtctacacaggtctgcatgcctgtgcaggtacctggctccttgaccaaggagggtgataaggccccacctgaccccagagatttcgccacctggttaggtgggcaggaggatagtctctctggagccctgggtcatggactctcagaggtagggagtgagtcagcgcttgccaagaggtggagacccagtcacccacggatgcttgggatgggcagagcctcctggggtgaagtcttctagggtctagggtcccacatggtggtccctggaaggctttctgttcttccaggccctacagaggagaccaaggctcagctggcagctagctgtggggccaaattctcctctctgcctaggggagagccccctgcagtaccccttgagagcccctggggacctgcctggggcacaccctggccctgaggaggcccggctctgggagcactgcagccaggatggaggaggcagtcttcagagaggcgctctctgggccagccctgtggggagggaaggccagacgggggaacctggaggggcttgtgaaccggtccctgcccccagaaacccagcagaggtggatttgaagcccattctgggcagtaggcaccggcaggcttctccgcctgaggtctgccctcctgagggtgctgggagagcacagccctgggaagactgcagcctgggcgtgacctgaggactaggaagtgtttatgacagacatggagaggcctaagtccctgttgaagcccagcatcacatcccattcctgagcaccaaaggccccaggccctgggtaagagaagcttcctgaagggcatcctgagggccccgcccggatcacgtcttctttggacaatttcaggagggaggctggcatgggccagacgactggctggtacagggaagagacgggaacatctggccctcgcctgcctctcgccacactccccacttccctcgtcactgtagccaaagttctccctgggctttccaccaacggtgccttcgttcatggcctgtgcgtgccattccttctgtctagaatgctctttccccctttgcttctcctttctgattcttcctaatttttcaagtctcaccttataagtcacttcctccaggaagtccttcctgctttgtcctcctctgatctgggctggatgtcaagcctctgtggttccaggacgtcctgcctctcaccctcacccccagatggagttgctggctttcccacctgtctccctctcaccctcagccccggatggagttgctggctttcccacctgtctccctctcaccctcacccccggatggagttactggctttcccacttgtcttccctgccaggccagaggcttccagcgggtcagccctggctctgccctgctcagtgttggagcccacatgcctcgccaggtgtgcagtgcttagtatgttctcagtccatgtttttgagtgaacaaatagatacatgaacaaaaccccaaaatcacccccaaaagatgtgatcatttcccaggcccaatgggaagatctctgcccaggtttcctctaggtggacgccttgccctgggcactgcccttgtgtgtgtgtgcgtgtgcatgagtgcctgcatgtgtgtacatttgtgcacatgtgcatgggtgtggatgtctatgcgtttgtgtataaatttatgtgtgtgggtatgtgtgcacatgtgtatgtgtgtctgtgtgtacatgtgcatataagtatgtgtttgtgtgcatgcatgtgcatgtgtacgtgcactcacacgcatacacgtagaggttgctcacctcttgctgagctccttcagggcgccactccggcacaggcccaggtaatcccccaggagcttcagctgctcccggctcctcccaatgaggtgcatccgctccacatgctcgtacagagacgcgttcaccatctgcaggttgatgaggggctgggcccggatctgcgtcagaaacttcagggcctgcctgcagatctgggggtaccaccagacattggggatgggaaggaatggctgttcagtgagcactgcctggccaggtgccacatgacctgctcacttacctgaggggctatcttcattttacagatggggaaactgaggctcaaggagatgaagagatttggctagggtcacccagcttgtaaatggtacagtcaagctctgaacccagtttatctgactcccaaacccgctctccctctaatggcaagggtcactgccccctccccaatcatgctgagatgagggagggactgctctgataacgccccctccctctgggcctcacagatccttcccactctttcctgtcctcccagccgctatttcctcccactaaaggaaacaggcactcccttctgtgccctgattcaggaaccaggtgacaggctgagtcaggctccagccacaggaagctacagatcagacacagctcaccaacaggcttccctgagctccctcggctcacaccagtagcaacaccgggactctgtgtgcagctgagtgatccatctcagtctctcctggctgacagggtgttgaaggttctacccttggccctgatcctaataccaatgccaataatcaagcgcctactatttgcaaaacactgggtcaggaacttgaccacatcctcccgtcattctcagaacaacctgttagggagggtgtccctgtccctgttttctagatgaggaaacggaggcttagaggggctaacgtagcttatacaacctgcctgcagaacctgccaggtttgagctgaggtgtcatctctgaacaccaggctgctgcactaatcagaagccccctcccctgcagtggcctcgctgcatcataaggacggaggagctgttgtctccacagccgacaagtgcacagtgattagaagtctggctttggcctggctcagatctttaacatcttaactagtcctctcgttacatattttatttctggtggctttgtttttgatactattataagtgattatcttttaaaatagtaatttgtttgctgatatatagaaatgaaattgatttatttgattgttatatccagcaaccttttcaaattctgataaattgtgtaggggaaaaaaagtctggcttcggagtcagaatggaattgaatcctgcctccaccactttatacctgtatgaattggtgaaacttatccctctctgtgactcagtttcctcatctgtaaaatggggaaaatgagagcaattaaggctcacgggtttggggcctttttgttcgctgctgctgctttagtgctgaggcccggcactcggcaggatgtcagcccaggactgggacttctttttcatgggattattttgaattcagattaaaagaggtattccaggagagctcctggcattagggcctggcaggtggcacatccccagtaaatgtgagctgttatcagctgctgtgtgagtgcctggtatggccctgttgtccccttgagggttgggggactaaactggccctcaggagacctgcccctgtatttgggggctgagggggcctctgacctcttgtctcccagctccaccagcatctctcacctccccccgcaatggacaacctcttcttttcccaaagcctggggccctgaggtaccagcccccccagcctagggacagcccaatggcaaactcctggtgacttgggtcaagctgctgttctccaatcctaactcagctcttcccatgacttggccccaggccttgggtgaggctccagtgaaataacacacaggaatgtgcgctgaacactgccaaccactgcagatgggcaggggctttgtgctccccagcgactgttcctatcctgtgggaatggaggagacagaaagaagccccactcctgggctgacatcctgccagtgccagccaggcctcagcaccagtgggtcagccagaacagcaacggcgaacaataaggccccaaacccgtgggccccccactttctatcttgaatttccctgtctttcctaggccagcaatctttgagagggagagcgagctgaggatttcctgatctcagatatgcctagaaaaggattgtacttttctttctttctttttttttttttttgaggtggggtttcgctcttgttgcccaagctggagtgcaatggcgcaatctcagctcaccgcaacatccgcctcccaggttcaagcgatcctcctacctcagcctctggattagctggattacaaacatgcgccaccacgcccagctaatttttgtattttttagtagagacagggtttctccacgttggtcaggctggtctcaactcccgacctcaggtgatccgcccacctcagcctcccaaagtgctgggattacaggtgtgagccgctgtgcccagctaggattgtactttcctagttagaaaaggaagtggcacaaggatgagggcagtgaataaggagatggctcagcggaagtatcagggtcctgtaaatagttaacgtgttttatgatcaaagggttctttgcatttttggtgattttgaggcttaatttcctctatgtagttagttaaatatttaacactgagagcaagggcggggacaaggcaaacaacaaaaaaatcaaaatgaagccaacttctgcggggttcccctgccccagggaggtggaggttgaggtagaactgactgagagaatcaccctgcactatgatgaagacacatccacacatcaggactacatagctggcaggccctgactctccagaggagcaaacagcttcttccttatgtttctgtgtctgtcttagtagaaatctgtgcccttggaagaaaaccaaatttgtaccccttgaggcagacactaaccaagtgaattaggtagatgggtggatgggtgggtgaacataggcaggaggtgtgacaggccccagggagggaaaggacactgttcttactgacaggcacacactgccacacctgccctcccaacaaccccgacacagacactgttgttaaccctccttttacagatgaggaaactgaagctaatttgctcatggtaacacaggtaggaaagtggctaagttcagctggagaaaaggaaaattctgaaagactttaagatacatcttattcaaaagcatttggtgaacataaaaaagtacccaaggcataatattaagtgaaccaagcttcttataaagcagtatgagtcctgtgtgatcccaactttataaaaaaagatgcatatgtcaataaatgcacagaaaagggtataccccgaaatgttaataatggtgatctcttgtttatgacacagaattttgattggtctttgggtttttctgtaactttaaaatgttaaacaataaccgtgtattatcttaataatgggggaagtcacagaaaaagtgcttttcaaaaacatgaaataaataagcccatgtagggcctacaggggagtgcagtcacctgggcctcatagggttggcaaaggcaaggatgactgctccaaggtatagccagctcgctggccagcccatctacccatccacctacctattcacccatccacccagccatctacccaccatccacccatctacccatctacctacccatctccctacccatctacccattcacctaaccatctacccatctagccatctgcccattcacccacccatctacccatctacctacccatccacctacccaccaagccatccactcatccacctaaccatttacccatatgcctatttaggcacccatctacctacctatccacccattcaccaatctacccaaccacctacccatccatccatccaccaacccatccacctagccacctgctcattcacctacctacctacccatccacctaaccatccacctagccacctgctcatccacctacctacctgcccatccacctagccacctgctcattcacctacctacctacccatccacctacctacctgcccatccacctagccacctgctcattcacctacctacctacccatccacctaaccatccacctagccacctgctcagccacctacctacctgcccatccacctagccacctgctcattcacctacctacctacccatccacctaaccatctgctcatccacctaaccatccacctagccacctgctcattcacctacctacctatccatccacctagccaccacctgctcattcacctacctacctacccatccacctaaccatccacctagccacctgctcatccacctacctacctgcccagccacctaaccatccacctagccacctgctcatccacctacctacctgaccatccaccatccatctatctatctaatctatcaaatctattttatctatctttctatctatcatttatctgctggtgccttaagcagttatgtttgtagctgcaggaaaccatcctcaaactctttcctcctggggaccaagacagccaccgatagagccctgcccagggctgtggacaggcaccaagcttttctcttggttagctcccccacgtcacactgcctgaaccagtgaccccagcttcccttgtttagaggagccaaactcctctaaacagatgaacagcagcagcaaagaggagtgaacacccctctgtccctcagcagctgggctgctgggctcgagacttaccgggcgcttggtgaggtcccagttgtggatgatcctggccggaatcactgaggcatcgtcttggtggcagatgtcacagtaatagaggccagagaaggcacagagcttgggtcgtacaaaggagaagccgatctgccgggagcagcctggggagatgggtggagagtgagtggtgtggccagagtcagctcctagtaacttgggagctgctgtggtggaaaggatctgctggttgatttttttttaaggtaggcacaaacacaagaataaccaccactcgtatttccaccactcagaactcccctactaattaatctttacaacaacacactgtaagaactatcattattttacagctgaagaaatggatgctcagagaggttaggaaatctgtctggtcacatagtgatgaagtggcatggctggcattcagatctgggtttggctggttccagagcctgagttctgctccactaccccttgctgcctgtgtccggtgtccccactgctggcttggcaatgccagcctcctctaggtccacccctccactcgggccccataatggaagcagcagagtaggggctgtggcaagcagtgaagtagctgggggacagggaccggggtcggggctggcaacagggagtggatgggtagccagcagggggcaggggagcgtgcacagtatctgatgcctcgggactgtggggcagggctggcttcagcccccttggttggaggtgtctccacagccggggccagtgggaatgggagtgggatgtgccctgggcaaaaagcagaggccctgactcaaaccctgaacatgtgccgtaactcctccaggggcaggcagaagggtccccgggccttgggaccagagggcgggctctgctcctcacccgctgcctcaccctgaccttcacctgatttcttcaaggttccatttcagtgactgtaaaattcagctactaccagctattttgtggggttattacaaagcttaaatgagacaaggttctgcaagtaccctgcaaattatgaaatacaacccagatgccagtggttggtgtctgccactgagccatgcctgctgggtagaaaggaaacccaaactccccggtggcacagtcccacccgctggtgggtggcagccatggtgagagttgcccccgcagcattcacacccacaggcgaggaaccctttcttgcaagccctggagtcctggccccctcagagcctggcctccacaggctgaagagcaaagtgtgagtgctggggcaggcgggggagaggtcaagcgaggcttgcaggtgttttctgcaggaagctctgttctgcctagcttctcccatcctcccggggccaaccgcagactgcttcctttcagacgcttgaaacaggcttccctccagtctgtgccaacaggacagctcccaaaccaaggctcagcttcttgctctggccttctgcagcaggacaaccccctcacaggtcacctaagggtcccatggtgatgggatgccatctgcctctggatggtggggggagtgggaggagctaacaatggaacatgggcagggggatgtcactcaaccttgaataagaccctagagggatgccctctagggtcctgcctatgagcaaaggctctggggcctgactgtcagggtcccatttctgcctctggccaggcatggttgctgatatctgtaatcccagcactttgggaggctgaagcaggaggatcacttgagcctaggagttcaagactagcttgagcaacagggggagaccccatctctactaaaacaaacaaacaaacaaacaaaaaaggaaaattctgcctctgccacttactagctgtgtgagctcagtagcagacaccaaccaggtacttaccagctctgtgcttcaatttcctcccctatcaacagagatgataatagtagcgcctatctctacagggttgttatgagacttaaatgagataatccaaataaagcagctggcccagtgcccagcacagaagtattagatttgatgatgaggaagacatagcagatgtactgatttggaataacatccacagtgtaggaaaaaaccaagttgtggaacaatatatccagcattcaacacagcagccaagagccccgtgtgtcccctttaaatgtatgaatttaaatggaaaattcagttgcttaaccacactagccacactttaagcacctggtagcactacatggctcgcagctatggcactggacacacagatctaggacattttcatcatcacagaaagttctattggacagcactgaatagcacgagcccatttttgtaattaaaaaaaaagggtgtacacttagaaaagcagcagaaatatttggaaggaaaccatgcccctgctctgaaagaacaggacagtagagcaagaagaaaatgaagcaggctgggactccctgagcagcgcagtgactagccagcctgtggcccatcagtgggaggtgccaggagagggacgggtgagcagggcccactgcctatgagcagggcactggccccagccggggctggggaggagcagaagctgtagggcaagcctgatctgtggcctcatccctaggggaaggatgggggcatttgcggggaggcagaagggtggggagcctaaatcaggaaccagcaggaggcggagtgaggctggcaggctgggggtggcagcagagcaagtcggcacctgcgcagaagcagccttgggagtcaaggcctttctccatggggatggccaccaggtactgcagcaggaagccattctcccgggtggcaaatttcagcacctcctgacagttttcatccaggctcccgcccagggtcaccgcctcctcggctgtctccaagtaggatgccaggactttgcggaccagatccctccacagggcggcttcctcggcgtttccggcctgcagcttcaggacagccttggccgtgatgattttgaagaaggatgggcccccaaggctggtgtctggcaggatgtcccggatggtctccacgccgtggctgtcactcagcatcttctcattgttcctgatgcggaaacatttcagagcctccaagggcagagaaaatatatagggcatccaggtcctgtccatgtacaagtacagcagggactccttgatggcatctagctctggaacctgggcggacgaccagtcagactgtgtgccctggagggccgcgggctccgagagcaggtctgagggagagaggcagccctggggcgcctcggggggttcctcaggctggtctgagtactgcacgttcacccactcatcctcctgctgaggccggaccttctgcagggcctcccgcaccaggtccagccagtcctcagcttcgtcctgggaggaggcgcgcagggccagcttcttgccagagaagaccagctcaaagcgcccgtcactgtgggctggccccacagactcacagcgaagcagggagcagttctccacacaggtgtgctcctcgttgctcaggtagaggcggaactccagtggggagagctcgcagaagagctccttccagatgcccattgccccctgccgctccacggtgcccagcttcatgagaccctggaatgggttggacagtcctggaggcagaggcaaaaaggggcacattagttggcgggcctgtctctgtcctgcccaaggcagcctctgctgcctgatgccctgcagtgcatgtggccagtgactgtccccagaacacaggccagccacggggcactatcacatgggaccctgaaagctggatgggaacatccccattctcaccgtccactgctgctcttgcatcctgtatttcactgagaaaataagagcacccaaaagatcacctccacacgccctgttccctacacccacgccttccctcctgttgccagggatgaaccaagtgtgcttctttctgcgtgaggccaaaccctccatttgtgcaggaggtctctcccttggccaactactcaaggacaaggagcagtccttctctcctctgtcgctgctttcttccttctctatggggtgactcccatcggcacacatgcacgctgtcatttctcccatctttagaaatacctctcatctccacgcacttccctaatgaccaccatgtttctcaggcccctttacagaaaacctgtttgaagaggcatcaaaactgttcatcttggccggaagcggtggctcacgcctgtaatcccagcacttcgggaggctgaggtgggtggatcacttgaggtcaggagtttgagaccagcttggtcaacacggtgaaaccccatctctactaaaaatacaaaaattagccaggtgtggtgagcacctgtaatcccagctactagggaggctgaggcaggagaatggcttgaaccggggaggcaggggattgcagtgagctgaggtcactccactgcacttcagcctgggtgacagaggagtgagactccgtctcaaacaaaacaaaaaacctcttggtctctagtttccctgctcccattccttctcaaacctgctccaagtaggcttctctcccctcattctactgacactgcttctgagatggtcaatgccctcctcgttgccaacccccaaggccactcctcagccctcgcccccacccttctatctctctggctcggtcctccctgtggcctctcacgttagagtgcccagatgtcagtcctgggtccttgtctcctctctgtagatgccactttctcaccactctacctgctctcaggctttagctcccaatttttatcgccagcctggaccttgttcttgaaatccacattcatatatccacctgtgccatacatgtccactaggatctcagctgacatgtccaggatgaattcctgctgccagcctgcttcctcctgaatggtcctcatctcaccaaatagcaaaattcatccttccagatgcttgggctaaaaatcttggtgttaccccaggttttctttctttcgcagcctacatcagcaaatcccattggctctgccttccacacatccggaatccccgcctctccccagccgcaccccacccactgtcatctctggcctggcttgtgatgacaacctcctaactggtctttctccccttctccccgtagtccctcaacgtaggagccatcatgacccatttaaagggaagtcagagcatgtccccctgccccaaaactccacagtggctgccatctcccttagctgaagccaaagtgcttccagtggcccacaggcctcgtcagattgacctcgtcgctcactgccacacccccatctcctctctcctgccactctggtctccactgtccctggatgtgtcaagcgcagccccagcgcagggtctttgcatttgttctccttgcttgaaacacgtacattgcctcatgactccttccctctctcccctcgcatctcctcaaacatccccttattggtgagggcttttctggccatcctatatgcagtggtccactctctacctctgtagacaggtagagatttactgtcctccatagcacttattaccacctgaccacacactatgcttacttgttaattttatttcccgtctcctctactagaatctaaatcccatgaagacagggccactgctttgctgcctgctatgtccccagcacttagaacagtgcctggcacatcacagagcctcaataatatttgctgaatgaatgagcaggtgagtgcctatgtatcacatgttgcccaaagctccctgctgcctggggtgtgacaacaaccagagtgtccaaaggacacacaattctctctccgccagcctggaatagccttggagatttcacactattctatgggggttccctacccctcaagaaacctgatggcctagacctgaagcacagcttcgctggcaggttagagaccacagccatcacacgggccgacagacaaacctaacagaagccagcccggagactgggctctacccacacaacccatgccagggctacccacagcaaggccccctgagctgggcaggattctctgctgggtcactgcaaacagaaaatgaggagagaaagagaccaattctagagcgtactttttttgtttgttttgaagaggaaacccatcatgagggttactgaaaaatttggttatggttatttaaggctttctggaatttcagtgtgtggagatcaagctgaccttgctgtaaaaagcactggggaggtcgggcatggtggctcacacctgtaatcccagcactttgggaggccaaggtgggtggatcacatgaggccaagagttcagaccagcgtggccaacatggcaaaatcctatgtccactggaaatacaagaatcacctgggtgtggcagtgcatgtctgtaatcccagctcctggggagactgaggcacttgagctgggaggcaaaggctgcagtgagctgagattataccactgtactccagactgggtgacagagcaagactctgcctcagaaaaaaaaaaaaaaaaaaaggaagcactggaggacattaaacaaatagcagatcctccagcctggccaacatagcaaaacaccatctttattaaaaatgtaaaaattggccgggcgcagtggctcatgcctgtaatcccagcactttaggaggccgaggcgggtggatcaccggaggtcgggagttggagaccagcctaaccaatttcgagaaaccccgtctctactaaaaatacaaaatgagccaggcattgtggctcatgcctgtaatcccaactactcgggtggctaaagcagaagaattgcttgaacacgggaggcggaggttgtggtgagctgagatcacatgattgcactccagcctgggcaacaaaagggaaactccacctcaaaaaaaaaaaaaaaaaaaagcaaaaattagccaggtgtggtggcaggtgcctgtaatcccagctatttgggaggctgagacaggagaattgcttgaacccaggaggctgaggttgcagtgagcagagatcatgccactgcactccagcctaggcgacaaagggagactccatctcaaaacaaacaaacaaacaaaacaaatagcagatttgatcaagccacccagagctgttacataaaccaactactgagggtaaacacgtttggaaggaccatttaaaacacctggggcttcatggggctggatgtgctctgagctacaggtggaatcaagagttttctataatcataaattgcatagttttcagggaaaatattttcctatttgactggtgaaacagtatttttgtcctctgtaggcagttttgagacaatatactacttttcctgaaatgcttccctgaatgaacatgattatgatggcattctggaatgaggttttataacacttgtgggaacacactacccctttagcaatggaaaacagaacttcacagctgccttctgaaaggcctggtccctgcagatgggacccacccgggaccctcctggtcacctacccatctgcctccggtgtaccacctggaaactcttatgcccctgggatggggctgcctgggcttgccttcttcctggggaaggtacacacgcttggtctaacgcccccagggagcagttttttcttggttcttgagaaaaatgcctgtggagaccaggccttgactctggagtccccctgtaagaagctattgggtggtctgaagcactcttcaggggttgctcccgggaaggccggtagaagtcatcctctgagatccagctcttgtttttctgttgggaaagaagacaacagttgtttgttttaaagtttttttgttttgagacggagtctcgctctgttgcccaggctggagtgtaatcgcgcaaccttggctcactgcaacctctgactcctgggttcaagcgattctcctgcctcagtctcccaagtagctgggattacaggcacccaccaccatgcccagctaatttttgtatttttagtagaggcggggtttcaccatgttggccaggctggtctagaactcctgacttcaggtgagccacctgcctcggcctcccaaagtgttgggattacaggtgtgagtcactgtgcccagcctgaagtttttttttttttttttaagtctttatctagatatggctcttatatcataaaattaacccacttaaagtatgtaattcggccagccatggtggctcacacctgtaatcccagcactttgggaggctgaggtgagaggatcacctgagcccaggagtttgagaccaacctgggcaacacagtgagaacccatctctacaaaaaataactagctgggtgtgatggcacacacctgtagtctcagctactgaggaggctgaagagtgagaatcgcttgagccagggaggtcaaggctgcagtgagccgtgatcacgccactgccctccagcctggttgcagcctaggcaacagaatgagaccccatctctaaaaaaataaataaataaagtgtccaattcaaacattttggcttagtcagagttgggcaatcgtcaccaccacctaagtttagcaaattttcctcacccaaaatggaaaccccatacccattagccatcatccccatttcccctggccactctcagctctaggcacctacttatctactttcggtccctacacacctgcctgttctggatatctcatatagatggaaccatatgacatgtgaccttttgtgcctggcttctttctcttagtggaaggttttcaaggtgcatccatgttatataagcatgtttaagtgttcattcctttttattgccaaataatattccattgtctcgatccaccacatttggcttatccactcctcggctgatggacatttgggttgtttctactttttgtcaattatgaatagtgctgctatgatcacttatacacaagtttttgtgtagacatgtttcattgtcttgggtatatacttaggagtagacttgctgggtcatgtgtaactctatgtttcccttcttgaggaactaccaagctgttttccaaagtggccgcaccattttatattcccaccagcaatgtacgagggttccaatttctctccttgggaaatctatccaaatccattggaatctactcaaatccattgtctgtcttaaaatggggctgtctttttgttgctgagttgtgttgtgggttgaattgtgacccccccacaaaaggacatgttgaaaccctaccccccagtacctcagaatgtgaccttttttggaaatatagtctttgcagaagtaattagttaagatgaggtcatgttggagtagaatgggctgttcatccagtatgactgatgtccttataagaggaggagaaaagatacacaaagagaggagaacaccaagtgaagacagagatacagaggaagaacttgtatgacagcagaacatgtgtgacagcagaggggagaccggagtgacatgtctacaagccaaggaatgcaaacgagcacctgcaacgccaaaacccaggagaaaggcgggaacagattcttccttagattctccagaaggagcctccagaacgatcagagaataaataccagttttgttttgtttttgagacagaacctcactctgtcacccaggctggagtgcaatggtgcaatctcagctcactgcaacccccgcctcccaggttcaagcaattctgctgcctcggcctcccgagtagctggggttacagatgcttgccaccatgcccggctaatttttgtatttctagtagagacaaaaccttgtcggccaggctggtcttgaactcctgaccccaggtgacccacttgcctcagccttccaaagtgctgggattacaggcgtgagccactgtgcctggcctattttgttttgttttgaggcagggtctcgctctttgcccagactggagtacagtggtgcaatcagggctcattgcagccttgactgcccaggctcaagcaatcctcctgctttagccccactgaatagcagagactacaggcatgcaccagcacgcccagcaaattttttatatttttagtagagatggggtttcaccatgttggccaggctggtcttgaactcctggactcaagtgatccgcccacccttgcctcccaaagtgctgaggtcacaggcatgagccacctgcccagcaatgtctgtttttgttttttgttttgttgttgttgagacagagtcttgctctgtcgcccaggctggagtgcagtggcacaatcctggctcactgcaagctccgcttcccgggttcatgccattctcctgcctcagcctcctgtgtagctgggactacaggtgcctgccaccacgcccagctaatttctgttttgtatttttagtagagacggtgtttcaccatgttagccaggatggtctcgatctcctgacctcatgatccgcccgcctcggcctcccaaagtgctgggattgcaggcatgagcgactgcgcccagccaatgtctgttgttttaaaccaccctgtgtatggtactttgttatggcggccctagggactaattcaagttgtaaggtgctttatatattctgaatacgagacccttatcagatttatgatttgcaaataatttctcccattctgtgaggtgtcttttcattttccggatggtgtgccctctggagcacataaattgttagttttgataaagtctagtttatctatttttgttgttgtttttgtgcttctggtgttgcatcttaaaaaaccattgcctaagtcagtatcacaaagattcacttctgtgttttctgccaagagctatatagttttagctcttacatttaggtttctggtccattttgagttagtttttgtgtaaggtgtaaggaaggggtgttattattttgcatgtgggtattcagctgtcccagcatgtagggtttctcagtcctgcttttgggtttgagatgagggagtcctggcgagcaggcctcagggtcctcattggccgcctctgtctctgccgcccacttctgtgcaggcccctgcgaccccaggcagccaggccctgccccttcccttcgttgttctcttttgaatctgaagctgctcattggctggggaagatggggttgcggggagcatctggggtgagtgggcttgtgggagtggattctggttccttttctccagtatttcaagtcctccctggcattctgtgcctcaacatggaagggcagaggcaaggaagctggctgggccaactctaagtggctgtgtacacagaggaaatgagtcacacaagcagtgggaccagccccgctgttttgtgaagtgccactaacctcaccctgacatcgctatttccagtccctgaatcaagagtgcactccctgctttgtaaacagggaagggttggtttggacagttggatccattcagatgctacacgactcctcaagccaagggtggcaagttctgactcaggcaacttgaggggtggctcacagaactaggtccccagagactcctccatggggccttcagaattggcaggtgcttcccccctgccagtgacagatgatgtgtcagtcagggcagccactggggaccatccacaacactagattctgagcaaagcctgcctaggtcatcaagaactgggggacctccctgaggaaaatgggtgggagaaacagctccctggcaaccatgtggctgtcctggcagcctcacatatacctgggaagttgtgtgatctccagcgcctggtgggagagggcactgtccctgaagactcagctcaggagacatccatcgcctctgcctggaagcttctctcacccttccccagcctccaccccttcccaccccctagctgggttagggcccctactgggatcccacaatattctgtgcttaccctcattctagcatctataaggctgtttggaatggttttcttgatatctccagcaagtgcctgccagagtcatacaagatgagggaataaatcatgaccatcccaatgtctttaacataaaataacaaaggtgggtcaagtggactggaaggaaggagacaaatgtaaattttaagattatggacattcagaatgggcgtgatggatcatgcctgtaatcccagcactttggggggccgaggcaggaaaattgcttgaggccagaagtttgagaccagcctggccaacatggagaaaccccatctctactaaaagtacaaaaattagctgggcatggtggtgcatgcctgtaatctcagctactcgggaggctgaggcacaagaattgcttgagccttggaggcagaggttgcagtgagccgagatggatggagctattgcactcccacctgggcaacagcgcaagagtctgtctcaaaaaaaaaaaaaaagtttatggacattcactggggaggacttctctctcctttgaggaaaaacactactaggaaatgttcagacacagtccattgagcacagctgccaggaaatgaaactagggaacatcttttactctcttaagcaacagggaaaaaacagtggaaatgcaggttcctcggagcttctgcacatgggcctggacagagctctgaggctgtgtgcccctggccccaggcgggtggggagcagagagagggtgtgagagagagtgcacgcatgaacaccactgtttctctcttctctcctttttttcttttagagatggagtcttactctgttgcccaggctggatcacagtggtgtgatctcagctcactgcaacatttgcctcccagtttcaagtgattctcctgcctcagcctcctgagtagctgggataacaggctcacgccatcatgcccggctaatttttgtatttttagtacagacggggtttcaccatattgttcaggctggtctcaaactcccgacttcaggtgatccacctgcctcagcctcccaaagtgctgggattacaggcgtgagccaccgcacctggaccccttctctccttttttcccaccaccttccgacaacctgctcactcagggtccatgtctggccagcaccctgccctttaacagtggagagaaaccatcaccgactaaggatctataccagagctgcaactgccaccagggacccaagacagagaaatgccaccttgcgttactaaagggctcatgacaccatatacaacagctgaatccccaagaggaatgtggctgaggagtgagacgaaggtctctgggacactttcagaaggatgagactttgtccagccagtcctcattatgccaggcaaaggaactgcctgtactcataactgtggaaggggaaccacataccatgggcaggtggtccatgggggcagtgattaagagcaagtcctagaactcacactgccttttgggagttaaactgaaaccaactcacaacccccagatcccagacatgcgtcacccttgagaggcccctattccctgcacctctccttcccagtgcttagcacaagtgtaattatgatgtggataatcatttgtctaatttaatgtctgtccccaaagagcctttgtctgtcctgttgtatcactctacccctaggacctaacatggtgcttggcttatagtaggtgctttgggttcaatgaattaaaaataaatgtttttaaaagaaagactgaatgggcctctacactataaaacttgacagtgaccccaacatctcccccaaaataacatcaaataaaaagcacgtggctaactgatagaagtatagaaagatgaggaccacaggggcagatatgcagggcacagcctggcactgtccacaggccaggagcccagcaggcccacatgagctggcaggctattcagtggcacctggtgactacctactgaataagcagtgaatgaatccacaacttccctgtgagacagacacaggacgggggcaggatccgagattctcacatcggactcagcaccaagcgcttagatgtcacattcgctaagcaaccttccagcaatcagagtcccctgtagctggcacagaggcagagcctgccatgatcacaccaacctgaccaccctgtccactcgatggtacacttcgctgacccactttggcctcccaaattgctaggattagaggcgtgagctatcacgcctcgcctgaacgtccataatcttaagtttcacatttgtctccttccttcaagtccccttgacttatctttgttattttatattaaagacattgggatggtcatgatttattcacacatcttgtatgattctgggccaggtacttgctggagataccaagaaaaagaaccattccaaacagcgttatagctaggatgggggaacaaaataaacttaggaattggcatctcaagagtctcttgggagttcaagaactattcatccatgcctactttctcccaggtacagtgcttggtgctgacaatacagaagtgaacaggcctggtgctctgtatcatagagctaatattctagtaaggaagacagaaaataaacaaggagacaaagagataatatactgtaattgcacatagtgatgagtgttataagcgaagtcaagcagatgaatgggacagagagtcactggggatggtgcttttgagctacgggggtccggtcagggaaggctgagacaacaatgaagtgagtcgggaaagaaggaacagcaaatgtaaaaccctgaagctgggccgggcacggtggctcatgcctgtaatcccagcactttgggaggccaaagtgggcagatcacttgaggccaggagtttgagaccagcctggtcaacatggtgaaaccccataattttgtaaaaatacaaaaattagctgggcatggtggtaggcatctgtaatcccagctacttgggaggctgaggcataagaataagttgaacttaggaggcggaggtttcagtgagctgagattgcaccactgtacttcagcctgggtgacagagtgagactctgcctcaaaaaaaaatttttttttcaaagaagcctgatgttggaaggagttcgcttggactacagagctgcaaggaggccggtgggtcagagcttagtgagcaaagatgctattctgtcccaccagctttgaggccctggcaagataagatgcctgagcctgcaaagcagaagctagaccatgggcaggagtgaactcaacatgcttagtgccactctggagtcctgtggggcgcacagcctgcatccccagcagacgtcactctgcctccagcttgaggaaggggctgcagagctttcctcttcagccttcagcttgagttggcaggtgcacagtcacaaccttcagggtcctagagcattcattttcaggaagtaaatcttcaggatgtactgaagcatcttcaggatagcaaattcgaagactctgacccacactgacggttttgtgatttacatggtcatattcaagaaacagagcgaggccaatcagatatccatatggaaaaatatgaggtttgacttctaacaccacacataaaaattaatcccagaaagatcataaacctaattgtgaaagataaatcactaaagcttctagaagataatataggcaaataccttcagatccttggggggagatgagtatctcttaaatgggacaaaaaccaagcaaaccataaacaaaaagactgataaactgcacatcattaaaagaacctctgttcaataaaaataccattaggaggtttaaaagtcaagccctatagactagaaaaagatacttgataaatatagtttttgtccaatgaaagacttatatctgtaatatataaagagttcctacaaatcaacacatacacatacaactcaatttaagaccagaatgacaacttggacagacattctataaaagaggattgactggccaataagcaaatgaaaaggtatcatcatttagtcatcaaggatatgaaaattaaaaccactacacatctaccagagtggctaaaattaaaaagattggtaacaccattggccaggataaagagcaactagaatgctcatttgttgccaatatgagtataaattagcacaaacactttagaaaactgtttggtggtggtatctattaaagctaaacataagccacccaaggacctagcaattccattcccaggtatatatacccacagaaataagcaccgagtttctccaaaagcatgtatgagaatgttcactacagctttcttcataatagtcaaaacctggaaacaacccaaatgtccattaacgggagaatggataataggttgcgatatatttttacaatggaatactgcagaacaatggaaaagaattaactacagcctcatgctatatgtacagccacacaccaccatgcccagctaatttttgtattttttgtacagatggggtctcactttgttacccaggttggtctccaactcctgggctcaagcaatcctccctcttggtctcccaaagcgctggggttacaggtgtgagccaccatgcccagcccccaaatattttcattttaacttgtaatccataaaaatgagattttctattcttttatcatactaagttattgaaatccagcgcttatttcacatggcacatctccatttggacttgccacattttaagtgtacaacagccacacgtggcttgtagctgccatattggacagcacggctctaaaacctgggtcatgttgcaaagtgagtatgttcaaggcctagtattttctaaaaatattaatttaataggctgagtgcaccagctcatgcctgtaatcccagcacttcaggaggcccaggcaagaagatcgagaccagcctggccaacatggtgaaaccccatctctactaaaaatacaaaacttagccagacatggaggtgggcacctgtaatcccagctactcaggaggctgaggcaggagaattgcttgaacccaggaggcgaaggtggcagtgagcagagattgtgccactgcattccagcctgggcaacagagcaagactccatctgaaaaaaataccaaaaaccaaaaatcaaaaaatattaatttaataataacaagtactaaggaggaaatgaaggttcagagagctgaagtgacttgcccaaggccttatgctggtgagtggtagtggttaaagagctgagactgcggtcagactgagaacgaccttcacaaagtgacgtgaaaatgacaggagatacacacgggaagtgatcagcacagtgccgggcttatatctatagctcacatgccaagaaacagccgggcttatatctacagctcacatgccaagaaacatgagccccatcatcatgatgctattaacactatcactatgcagggagaggaaggctaacagggagaaggcagagaccactcagggtcactagctggggaaaccctgtgtcagctgacatttcccaagaccgccccctgaacggcttgcaccactcaccggactggtgggtgaggaaactaccagcttcagaccagctccgtcatgagcctgggccttctgcaggccattcccttggcccacttctctggctgtctcgctgacagtactagaaggctgctggcctgaggtgctctctacaggctgctgtaagtccagggggctgggcgcctggggatgcggctcctgcacgtggacaccatcttgagttccagaggctgcctgggcaggaaggggctctgcaggtgcctcacagtgcaggtgtgtgctggtgttgaggccatggagggagagttaggcctgtggtgtggggatctccgtttcttggctcagtccgttggttggcacagtttacctgggctttgctgaattccaacaataccatagaagttttaaacaaagaaacctgtgtgacaggttgtctgcgataatgcccaaggcaactggggcagagggaagaatgcaaaactgctgttttatgatttaaaacaacccacaccctctaaatgatccactgcactccccctcacacagtcctcctctgacactcccaccacgtttttcctggccaggatttaggcagactgcgtggacaggtgatgtgtggagcctgggatctcaggcgaaaaagctccccagcagaggaagaggacttggtatgaatgaggacttactggcattctgagcaggctagctgtgggcctggagagcttgctcagccaaacacatggttgtgtgggcaatcgtttccccaaacatggtatgcagcagagcctcctcctccacagcacagggagtagagatgccaggactctgtgccctggggcagggactaggagaagcgagggctaggcaggtttcctaagcgaggtcatactttgttcctgtgcaggcactgggacagcaaggggaggtgcaagggctggtcccctcagagctggactggaggtggagacagagaagcttcacatccccagaaactgctgctggagctcaatgtataccaggtgtgtgagggtggatatgagtacacacgagatgtgcccctgctcagtctccatggtgggactgccactccctgtctcctccgtgctgcttcctggggccacagggagcaaatgttactgccttggtacacgtgcgtgtacaccacactcacacatacacactgcacagaaacatgccctgggccctctggaatgtgcactgactagcaactgctcctccctctcctgaggcttcttctgaggatccaagctccattttgaaaataaacccgtttgctctctcttctgcttataaaaccagtggagcatgtcatgggcaaagcctggttcaggtggccacaggctgtctaaggccccaaagcctccctgcatctgccctgatggcttggactgggtccagaagatacatgaagctctgcttaatttgggcttatggaaatgaggattttagaattcaagttgcttacctgattgtctttccagtgagctctgcaccatcttaaccccaaacaacatttcaagacattatcgtcaagaataggtggccaatccatacatgtataagtaactgattttggccgggtgtggtggcttacatctgcaatcccagcactttgggaggctgaggtgggtagtagaaccacaagatcaggagttcaagactagcatggccaagatggtaaaaccccgtctctactaaaaatacaaaaattagccaggcttggtggcaggcgcctgtaatcccagctactcgggaggctgaggcagagaattgcttaaacctgggaggtggaggttgcagtgagccgggactgtgccactgcaatccagcctgggtgaaagagcgagactccatctcaaaaaaaaaaaagtaactgattttcaacatagacaccaacacattttaatggggagggaatagtcttttcaacaattgtgctgagataagtggataatcacatgcaaaagaaaaaagctggactgctatctcacattgtatacaaaaattaactcaaagtggattaaagacctaaaggtaagagctaaaactgtaaaactcttagaaggaaagagaggtataaacttcatgtctttggattaggcaacggtttcttagatgtgagatctacagcataagaaagcaataaaaaataaattgtaatcccagcactttggaggccaaggcgggtggatcacctgaggccaggagttcgagatcagcctggccaacatagtgaaaccctgtttctaataaaaatacaaaattagttgggggtggtggtggtgcgcacctgtaatcccactacttggggggctaaggcaggagaatcacttgaacccgggaaggggaggctgcagtgagccgagatcacaccactgcactccagcctgggcaacaaagtgaaactctgtttcaaaaaacaaaaataaaaaacgtttgtgtggttttttttttttttttttgagactgagtctcactctgtcgcccaggctggagtgcagtggcgccatctcggctcactgcaagctccgcctcccgggttcatgccattctcctgcctcagactcccgattagctaggactacagacgcccgccacaacgcccagctaattttttgtatttttttttttttagtagagatggagtttcaccgtattaaccaggatggtctcgatctcctgacctcgtgatcctcctgctttggcctcacaaagtgatgggattacaggagtgagccaccgtgcctggccaaaacgtttgtgttttaaaggatactatcaagacagtaaaaagacaattcaaagaatcgggggaaatatttttaaattatacagaagggcctattatccagaatatacacagaacacttacaaatgaacaataaaaagacaaataactaaatgtttaaatgggcaaacgatctgaacagacatttctccaaagaagatatccaaatgtttgataagcacatgaaaagacactcaacatcatcagtcatcagagaaatgcaaatcaaaactacaatgaaataccactttatacccactgggttgattgtaataaaaaagacagaaaataataagggtggcaaagatgtagagaaattaaagcttgtatatattagtggtggggatgtaaaatgacgcaactactgcagaaaacaatttggtagttcctcaagaagttaaacatagagttacatatgacccagcaattccacccctaggtatgtaactaagagaattaaaaacatgtctacccaggctgggcgtggtggctcatgcctgtaatcccagcactttgagaggctgagccaggcggatcacctgaggtcaggagttcacctggccaacatagtgaaaccctttctctacaacaagtacaaaaattagctgggtgtggtggcaggcccctataatcccagctactcaggaggctgaggcaggagaatcgcttgaacccaggaggcggaggttgcagtgagccgagatcatgccactgcactccagcctggggacagagcgagactccgtttcaaaaaataaataaaatattgaataaaataaaatacaacaataccatcgattgagcactattgatgcctctgtgccagggaccattctaagtacttaaatctaagtacttaaaccctccagactatacctatgccactcagtgatgattataatacagatccaatctacacagaagaagctatttaggacagtcaattcactaggccaactgcaatttggtttctgccaaacagaaccgatttatattaataaatttcattttgaatgttgtgtcttttatgcttttctttatgtttgatttgtggatgttttgattttatatgtgtaatgataagcacaaggaatttatgtctaatttaaagttacaaatatttaaataatgtaataactttgatgaactctaagtgtcagtgagaacattttacccttgaaatatacacttcaagaaatgctggtctctgtggatgctcaaggactaacttcaaggcccagctctacgaatgctggtgctggctgtgtgtttgtgcatctgtatgtcttacatttgccagttactcacaccactgtccggcatttgtctatacatcctgacccttgcccctccagtttctccataatagccgggacaacacttcctgcacagagaggatggtcactgattcagtgaccttaagctggaattttccatcacaagacacatgagataaaggcgagacatatgacaaggggatggctggctggtctgcagaggaggcagacacacaggaagggctaagacaggtgagtaaacctaggtcatgccctgtgctcgggacacactgcaggcctgtcatgccatggtcccagtggtcacaggaggcagagactgttcctccccaatgtattctatctaaattcctccatttaacatttgaaaactccacctaatgtgctcagaagccatttctgggcctacgagacaatctcctatattgtttgactaacaagcaatgtgcctgaccttcctgggcttgtaagtggtggaacaggactcgaaactaggtctgctccaagcccagtctgtaacaccacccaatgctggtgctctttccatgctgggtgagaaccctggagggacctgaaccaaggcgagggcacagggccagtggaaagaaggtcccaaacacgtgggaccttcttttccgctgatgcaacatggatccagctgaaggaggcttttaataagaagttcccattttccacctatcagatgagcaaatatccaaaagttcactaataccatcagttggcaaggctaagaaacaaggacattcctggtggagtgtaaatgggcaataatctgtgaacattccatattagtctatccttttgctcggcaattttgcttctgggagtttatggaacagagatagctacgcagaactaaaagaccacatacacaaggttatttatgaaaacacaggccccagcacccattaaatactgggctgattaagtaaactaaggtacattgatacactagaacaatatgcaatagaaaaaaaaagaatgaggctgagcgcagtggctcacgcctgtaatccccagcaatttgggagcctgaggcaggaagatctcttgagcccaggagttcaagaccagcctgggcaacacagtgagacccccgtctctataaaaaataaaaataaaagaatgaagaagctctgatatgaaaagatcttctccaaaacaagatatagaacagtgtgtatatactgcctttgtaggagagaaagtaataaataaggaagacattttaaaaatcttgtttttttttttgggacagagtctcactctgtcacccaggctggagtgtagtggcacaatctcagctcactgcaagctccgcctcccgggtccacaccattctcctgcctcagcctcctgagtagctgggacttcaggcgcccgccaccacgcccggctaattttttgtatttttagtagagatgaggtttcaccgtgttagccagaaaggtctcgatctcttgactttgtgatccgcctgcctcggcctcccaaagtgctgggattacaggcgtgagccactgcgcccagctgaaaatctttatactggtatttgttgtagatgcatttagaaatttggaagaatatacaggaaattgattattatggttttaggggtgggaggaaagaacagggtagagggagaacaggaatgggaaaggctttcactgtatatgttttagatttttttttaaccataaaaagattatctatgcaaattttttattttatttatttatttatttatttatttatttatttttgagacagagtcttactctgtcacccaggctggagtgcagtggtgcggtctcagctcactgcaagctccacctcccaggttcacgccattctcctgcctcagccgcccatgtagctgggactacaggcgcccgccaccatgcccagctaattttttgtatttttagtagagacggggtttcaccatgttagtcaggatggtctcaatctcctgacctcgtgatccacctgccttggcctcccaaggtgctgggattacaggcgtgagccactgtgcccagctgcaaaaaaatgtttaaaaggctgtgtgaagaaggctctgcccagttctctcttcagcctagttcatctgccccacatactcttccacacatctgtctgtccccacctgtccaccacctcctgcatgcagcactcaggtcctgtgtcccccgggaggtattctgtgaagtcacactcttatgcgttatgtttcatctatttgttggaagttttaaatgtactctgacctattagtttccttccttctagatgaagacaacaatattttacactgtgccttgtagagactaagtatcttgtttttttgttgttattgtttgttttcagtttttgttttatttatttatttatttatttttaatttagaggcaggatcttgctacattgcccaggctggcctcgaactgctgggctcaagcaatcctcctgtatcagcctcccaagtgctgggatttcaggcatgagccactgcacccggccaagtaacttgctaaaagtcaccggggcagagctggagcccaaaccagctctaagctgttctaagtccactttctccactatgcctgtattgcctgctacagttcccagctactccagtccctggagaagtcgatgactcccttggctttctttaattactaatagagttcagtaacagacaatcacatgctatgggaagaaagggaggaggagaggaaagaaaggagtgaagagagaagatgggaaggagtgggggcagggtactcactcttgcagagactggtctgagtcctcagcatttgctgtgcccaggtctgagtcataggacatgggctcctcgcaatggtctggactcttggagccattctcttggagtaagcagctatcagagtttaggctgcaggacagctgggatgaactggccgtgtccaggctgagggaggaggcagtcggcttctggttcctccgtatcttatggcccgagtgatggacttcgatgtcttcagagcctgaagaatgggaaatggaatccagagattccttccgctgtagttctgcaccagaggtagagagagggtccagctcagaaagcgggcaaagcccagacagggccagtggggtgagcgtccactcatttaagatggcagacttgtaggagagttcgaaggacaaggacatgaggccctgcaggaagctaaggaggaactcgccctcctcagcatcccggagcagggcggtgggctggtagtactcacgcaagcgggcctgctcctgcagcagcagcttcaggtagcactccatcaggccattgttcagggccagccgcagccatgcccggcagcggcccacatccatgttgacaaacgtcaggtgctccaactctgagatgatgtgtctgggaagggagaacagacgtgtttcaagaaactaccccaaatcacagagatgtgcttttatccactgatgagcaggaaccaggagtaactactgcaaatagatacaggcatgaaaaaatattgggtaatagtgttttaggccagatgtggtggctcacacctgtaaccccagcactttgggaggccaaggcaggtggatcacttgagctcaggaattcgtgaccagcctgggcaacaggacgaaactctgtctttacaacaacaacacagccagatgtggtggcttgcacacgtagtcccagctacccagctactcgggaggttgaggtggaaggatagcttgagcctgggaagcaaaggtcacagtgagcagagattggaccactgcactccagcctaggcaatatatatatatatttatatttatatataataaatatatataaatataaattatatatatttatacattatatatatattttttgagattggaattgtgaaagataatttccatgttcattccaactaccacggggcccctgacacatctgctcatccaaggcatgctgtcagagctccttaagtgcaaggtccttggagcaatgaagatgcagggtaaagacatggtccctgccctcaggcacaaggaactgatgaaaaaaggcataaagggtaggaaatcaacaaccctgtaagaggattggggagcgctccaattacagcatgtggcagaaaagtgggtggtttggttgcaaggccaggaaagagagggtcttaaatatcaaatcaataaggcaacaaggggtaatggccccacacccagctgtgcaccagaatcccctggggaacttgagcaggatacaagttctgggaccccaacctagtgaatcagtctccaggctagcatctgggagcctgtaggctacagatttttgtttagaaaagtgacttgaccacagtcatgcagactgcagggtagatgttctgcataaggagatcagaccccaggtgtaccaaactcagtcccagaatgcctccgtctgatgtacatgcccctctgagctaccacagtccctagcgcaggtttatctcctccatgggaatgtcgaccgcactctactaggctcagtgagtaagctccagggagcttcagctcagtaaatgttgaccagatgatggactcaaggaaagacagagtgagataagggggaacaatcgaaagccagtgtcacccaggaaagaagaacgtgagacaaggcagtggcaatctgcatggaaaggaagattagagactgacaaggcttcttttgggctgaagatggcatttagtagtcctcagaggcacagtgccagctacttgctcaaaagcccagacagttaggggccaaagagataagtgtctccgggtgaatattcatatgcttttcctgattccactctttaataaaaataaccccatacctccttaagagataacattaatggctgggcgcggtggctcatgcctataatcccagcactttgggaggcggaggtaggcagatcacaaggtcaggagtttgagagcagcctgaccaacatagcaaaacccttctctactaaaaatacaaaaattagctgggcgtgatggtgcgtgcctgttgtcccagttactcaggaggctgaggcaggagaattgcttgaacctgggaggcagaggtgccagtgaaccgagatcgcgccattgcactccagcctgggtgacagagcgaaactccgtcccaaaaaaaaaaaaaagatttacaattcggatgtttgaataatctaaggcagggtcagcaaatctaaggcagggtcagcccgtctgtaaagggccagatagtaaattcttcaggctttgcaggccacacaacctctgttgtaactatgtaattctgccccagtgtggcaaaaaaggctgttcctgctaaaggtggccagtctcacctgttttttgtgaccagtctcaaagcagccacaggctcttgcctgagtgctgagggtctcaagatctgctggcacactggctgggaagcttggtctagagataagcctttctagaagacactttcaacccctacctcaccctctctctatgctagaacacagggcacctctgttggcttcctgaacagccggggaggaaaagccaagtgtcccatactctgctgctcctctgcaaagcaaaacctctccagctaaatctcacttgggggtgacagctttcaggaggggccagaagacaggctggggcagaggcttctggtgggcacttttcttcctttttcctccggcctcagctcggatgtgcttggtgtgcaggccatggataaatacggcctccagggcgctgcacatggtgttggcatctccgtcttcactagtgaccaccatgtccagggacacgtactgcttttgcaaggctttcacggatcccaccagcttcttcttgatgacctaggcagcaccacacagaacacaggcctttagcagaaaatcctatggagagtccctagagtgtaatcctttagctggtgccaaatatatgtgcaaccacatgcacacacacctatgtgtgtgtctgtagattccttctgcaaaattagcacattgttaactacagcaaagaaagataaagcatagagaagaaaaggaaaatcacacacactacccagagataattactgttattgttgtttcatatgtcctttagtgtagatactttttgttttttagaccaaacttaagtgaacttagagccatataatcttgtgtttaaatattggccccatcatagctgcagtgatgggagcttgggtaaatccatctaggacaaggttggggcttcccaccttttttacatggacaagcttctgtagagaatcaataagccaagaggcaaaaactaacaaacaataaacacccacactgctttagaacaataaaaacatgaggagaacaggagcatggtttactttaagaaagatcctacgctgggcgtggtggctcaaacctgtaatcccagaacttcgggaggtcagaggcaggaggactgcttgagtccaggagttcaaggctgcagtgagctgtgatcacaccactgtactccagcctgggcaacatagcaagaccttgtctcaaaaaaagaaagatcctaggcctggaagccagaggactaggctcagtcctagctgtcagtaaccagatgggcctcctcagacattccacttaaccgctttgagcctcaatttccttatctgttaaagtggaaataatactttctgatttatagtactatgaggattctcctgaggacaggactaccttttttttttttttttttttgggaagtggtttctggtgaaaaccagaaaacctactagataaattctaaaaagaggctgggtgtggtggctcacgcctgtaatcccaacactttgggaggccaaggcaggcggatcacttgaggacaggagtttgagatcagcctggcaaacatgatgaaaccctgtctctactaaaaacgcaaaaattagccaggtgtgggccgggcacggtggctcacgcctgtaaccccagcactttgggaggccgaggtgggtggatcacgaggtcagaagatcgagaccatcctggataacaggctgaaaccccatctctactaaaaatgcaaaaaaatagctgggcatggtggcaggcgcctgtagtcccagctactcgggaggctgaggcaggagaatggcgtgaacccgggaggtggagtttccagtgagccgagatcgtgccactgcactccagcctgggcgacagagcgagactccgcctcaaaaaaaaaaaaaaaaaaaaaaatagccaggtgtggtggtgagtgcctgtaatcccagctacttaggaggctgaggcaggagaatcacttaaacccgggaggcagaggttgtactgagccaaaatcatgccactgcattccagcctgggtggcagaatgagactccatctcagaaaaacaaaacaaaacaaaacaaaacaaaaaacatgtatataaaagagctgagtgtggcactaagactagtgttttattcatccttgtgtcaacacttggcactgtgcctggcacatagaaatactcaataaatgtttgttaaatgaatacaccacaaaatgtacagagtcttttggaaatatagagtaaaaattgagcataattataagtatgtgaaaatcacataagtgattggaaaagaactggaaaggattacagaaaaactggtttgaattgttgggtgataggattatggctacatattttaatcttttattttgatttcagccaaaacactaaatgttaacattctttgaaaagttaaatttgaaaaaatataacggttttaatgagatataattcatataccataaaatacacccatttaaagtatacagttcaattgtttctagtatattcacacaattgtgcaaccatcaccactacctaattttagaagattttctggccgggcacggtggctcacgcctataatcccagcacttcgggaggccaagacgagtggatcacctgaggtcaggagttcgagaccagcctggccaagatggtgaaaccctcatctctactaaaaatacaaaaattagccgggcatggtggtgcacacccataatcccagctacttgggaggcagaggcatgagaatcacttgaacctgggaggtggagtttgtggtgagtcaagatcgtgccactgcactccagcctgggcagcagagtgagactccgtctcaaaaaacaaacaaacaaacaaacaaacaaacaaaaaaaccgattttcatcaccccaaaaagaaatactgtatattagtgattgccagtggctgggagaaaggggaatacgaagtgaatgcagtcactaatctattttctgtttctgcggctttgcatattttgtacatctcacatgaatagatatcaatacagcatacgaccctttgaatctgacttatttcacttagcatattttccatcaagttgtagcatgtatcaggacttcatccctttttattgccagaaaatattccgctgcctagatataccacattttattcatccattcatcagttaatagacatttgggttgtttctactcttttgctattatcaataatgctgctatgaacatccatgtacaagtttttgagtggactcatatttctagttctcttgggtatatatctaggagtggaattgtacacataaccctatgtttaacttaccaaggaactggcaaactgtgtgccaaagtggctgcactattttacattcccaccaacaatatatgagttccaatctctccacatttttgccagcactagttattgccttttttattacagccatcctagggggtgtgaagtagtatctcactgtggtttcgatgtgcattttcctgatgtctaatgataatgagcatctttattggccatgtgtgtatcttctttggagaagggtctattcaaatcctttacccattttataactggattatttgtctttttattgttgagttataagtgttctttatacattctggatactagacccttatcagatatttgatttgcaaatattttctcccattctgtgggttgtcttttcattttcttgatagtatcctttgaagctcaaaagtttttaatcttgaaatagtctaattttaaatgttcttttaaaagcaagatgttatttgtatattatatttaaaaagtacatacatacttcgttcaattgagcacctactaggtgttgggttagggtatacagggagaaataaggcataccctcaagaaaggcataccctcatggagtcagtttgtgcagctgttgttagaaggctgggttggccaggcttctgccctagctctggagggtcctggggtgggattcggcaggcactgggggtgggagagtgggggtgcagaggggagggaagagcctctgcatgaaagccagctgggaaacaggtggagctggactctcctgtggccaggacggggaaaggcacgtctctgagagctacagtttctttcaagcagagagttctctgagctgggaagcagcagtggggaggaaaggaaatcctggcttctccccgaaagccatctcaggatgctgctaaggcaccagccccaaagctacctgacttcctacctctccaagagaacagagagctctatctggagtacccaagatagcccaggagggtgcaaagggctgtccaagaaaaggtcctagggggctccagtgaactgctcacaaataattacatttagaatatcccagaaaatggtaagtgttcagatacatgtaagttaccaatttacccccattactgaaacaacaaaccagtgcctgggaatatctgtttcccacccattcagtgctttggccagactgtgaccaaatcatggcctaagggcagagggctgaagggctgaatggaaatccttggtcttcaggttactgatcttaaattcccactgcttttcataaatctccatcttatcaccaataaggtgatctagaaaagacagggtctcctcagagcctgcttgtgctataactttttctcaacctggtctctcttgcaggacagtgcccattcatttcgaagtgagccaagccgatgatacaactgtcccctgcagcccttccccgcccttgatcctccctcacccacctaccgggatggcagcctgggggtccagtccattctccaccactgaaagcatctccactcacgcagctgctccctcagagaatcacatgacacctgaagagacagatggcagccagatgaatgggcagggaacttccccccagccagagtccattcccagcaagcagcaggaggtcagcctctcttactcaaactgcaaccaaaaaggcctttgaagaacacaaaagtaaaaactgataatagatttgaaggaaagaaacaaggaaggaaagcccagggggctcagtcattgggaggcaaggagtcctgggtgccaggggtgggtccaccccaaggagtaggtggtaagggcgcttcacatcaaatgctgcccagaaagccaaggccctgtaggatcgaaacctgtaggcagggaatgacaggctgattcagatacggagctgcaggttcgagggggaggctgcagctgaaggtggcaggaacccactgggaccaggaagcaggggctcacaggctcacacatcacattcaggggctgggtcctgcaacaccctgcccccacccctcactcctgtcccagtccaacatctgccagctcggcagtaaaaagtaccactggaacggcttcaaaaggggagggctcccttgctacacttctgctcctcatttgggcttcgagggtctggcttgagcagcacagacagggacgtgtctaaccgggatgaccatgaggtctcatcgcagtttgccactaaccagggagacatgcacagacctctcagaaggagaatgtgtaaaatgcctgtcacggggcctgatatgtgcctgtacctgatatgttgtacctggcatctgtcatcccagtggatgtggccacctaaacctacagaccaagaatgtcatcgcctaaatgagtatgcaggaagagttgaagtcagtgagtggttaaatccctcagggctgccagcttcctcctgggagtgggtggggtggggtggggtggggtgggtggggtggggactttagcctgagcctgagggggctgctgactggcttggccccaccacagcaacttggacagacctgggccaggcaggcacattcactcgtaaacaaatctctagccaactcctggctgagcatcaggggaacgccgggaaaggtgatgtctgtctgtctcagctctcaaacaatcaccgcacaaagaagttaacaaaaccaagaaaagttaaatgggctcagttctctttacatatattgcctaatttatgttcctcctaaggaccctaggagtgctgttttattgtctccacctgacagataaggaaatggcagctgacccaggtcaaggaagttcctgaggtcccagggctgataagcggcctgactccaccaccagcccccaggaggaagccaaccccagccctaggaaaacccgattcctaagtgagtgctgtaaaccaaaaataaaattctaagctccccaactgcctgaatgggccccccttggccaaagggatttcaaaaaaactgaaaactgagttcaggccatgacaggaagtggggcgtgggccatgcctcatcctagcctctcccttttggagcttagacacaactgaccagcattaacattgaaacagactcctaagactgacagaacagactctcagcaattaagacaccaactccaacctgactggtctaacatcacatgggagataacaagccctaaggaaatcaaagtatcttacccccaagtatatttttgacatagtttggaatggccctgcaaagccatctcttgttgggaaaatctatgtcctgcagagattcccttccctttctaggccttttcctgatttagaggagatttaactaagagtctgacaccttagagacatttaccatctattctcttgaaggcttcatctacgtaacatgaaccttggctttcacaacccaccttatcttaaacccaagcttttcttctgctgacttttaactctttaggcaaagtttaactttttcagccaattgccaatcaggaaatcttttaatccaccttaccctgtccccaccaatgtataccttacatatattaatttatgtctttgcctgtaacttctgcctgtaacttggataaaaatcaagctgtaccccaatcaccttggggacatgttctcaggacctcccaggactatgtcacaggtcatggccctcacatttggctcagaagaaacctcttcgaatatttaacagagtttggctttttcatcaacagtgccatcacctcagagctaggattccaggggtggtctgggaagatcctttcgctgggggccgggaacagggggtgcaggggaacattaaggccagtgtggcaggaaaggtttcctggacagccctggagcagcatgaggtttggaaagcagacaggcaggctggccctaaatggtggaaggtgctctgattggatctctggcttctggggatagcagagggcaaacaggacacagggagtcaggacccagagccaacctccctaagtcaggtccctcaggaggaagcaggcatgtatggaggatggttcctgcagacccagtaacaggccgggtgctgcagatggccagaagagccctcagtcctgactacagccccatctgactgcctcacccttcaccatagtctgctcccagctacccagggattctcagagccctcctccggagaccagttccacattctggccacggggtgacaggaaaagggggctgtatgctgcagtgactctgcatctagggtcacttccagaaacaggcctggtcttgaggtcaggctccatcaaggctacccttttgcagctcagcaggccacgtccagcttctctggctccgaaaccctgggctccaatcccaatccacaatttccagtggcctgaggccctcaggcccacccttctagagagagcccgaagccccaaagttgcccttcccttaaccagctacagggccgggaccctaaggacttagacccaataatttgaattatagcccaggcccattaagacctcattaactaattagctgagagtgatagagtattcacagagtattcactgggaggagcaggccattggtaagtcagtgctctggccaagtaacagtatgctaagaaaacaaaataggccaggtgccatggcccacacctgtaatcccagcactttgggaggccgaggcaggaggttcacttgaggtcaggagtttgagaccagcctggccaacatggtgaaaccctgtctctaattaaaaaaaaaacaaaaattagccaggcatggtggcccatgcctgtaataccagctactggtattaccagctaccataccggctgaggcaggagaaccacttgaacccaggaggcggaggttgcagtgagttgagatcgtgccactgcactccagccggggcagcaaagcaagaataaataaataaataaataatttatgtctcaaataaataaataaataataaactgaagctggctgggcgcggtggctcatgcctgtaatcccagcactttgggaggccgaggcgggtggatcacgaggtcaggagatcgagaccatcgtggctaacacggtgaaaccccatctctactaaaaatacaaaaaattagccgggcgtggtggcgggtgcctgtagttgcagctactcgggaggctgagggagaatggcgtggacccaggaggtggagcttgcagtgagccaagatcgtgccactgcacaccagcttgggcaacagagcgagactccatctcaaaacaaaaaaaaattaataataataaactgaagctaagagagacagggccagacaagagaagggtcacttggcctaaaacagagtcagaaatgccacaaaatgactgacaagagctcagagaaatccagcagaagagccacttgaaaattcacaagataggactgagcctctggggttccagccacaatgcaggacacctctgtttgtaggcagccatagcaccccacctatctgtatctgttccatcatgctcagggaggcagggctcagatggtcagtgacataagaactcacggcaggaatcagaaggaggctttgtgtctcttgactgtggggacagcactgcgtcacccaccctggtggcccagattctgaatctaccatcctatggaactggttccactttctgtcctcaaaacgctcttcattgacacaaagaaccaaagtgaagagaggtgtggcttcaaggagacctacctgaagggagtgaggcaaagctgggcaacagtaccaaagggctcttgaacatgacgggtgaaagcttagcaggggaaaggtgactggtgccatttaggaagccccaaaccacaccaagtctactgccaccctatgtattcattcgccttcacatagctctccagagtgcagaaagcaagcttctctgatgtccctctctaacctcatttaattctcacagcaatcccgtgagagagtgattatccctgttttacagaggacaaaactgaggctcagtagcaatgggtctcaggtaagggacagaactctctggtttcttcatcccaactcctgcatctttccctggaccaaaaggcctcaggtctttggctcaaattcagacaaactattacttcttctttagaggtacgcggaagctccatttcatcacagaaggtctgaaaccaacaagaaacagttctgccaatcaggtttatagccccaaccagctgagaccaggtcctaccaatgctcctaaagtctcagagctatactttcttaaatgttccaacatagttaggaaggaacagttccggctggtttcctgcattatactgcctggccttctctatatgtccaatttcacttcctccagagatcaaggaagcaaaaaaagagaatgacctggatgagacttacgttaaaagaagaaagggataacctggtttcaccactctcaaaacactccaccatgactgaacagcaacctcttctcttgagggactcctcagccactccccatggccttctctccactgcccgaattgtgtaactggctgttcagagccacagcctggctttaagccatccaactgctgtaccaattgatggagtcatgttttttcaattggaaaagaatgacaaagttatcctctgattcagaaaggcagctgatctttcaggcatgtgagtgctgactgaggaaaccgcacctctgtccacctgaggaaagctggatttctgtgatgggtggagtggtgggggttggagctttgaagcaattaaataccagatgaagggtgagaaacttttagtttgtgattcccaaactcagggctagtggatgagggcagaattgtggagtcagtgaacactagctatctttctttcctccctccttccttccatccagtatcacccagcttccctgtattcttgtcccatatcccagaggattctaacaaggaccaaactctgaatgaatgaaaacaggaccgttgcctgacccattcaccattgtatttctagtacctggaacagtgtttggcacagactggtgctcaaaaaataagctgttgaatgaattgattaataaaataaaaacaaggcacggggcacgtacctccacttcacacactgtgggaagttggggtatacaactcttaagtgctggggcaactgtggagctcctgtcattaagccaagctgccaataaggctgaaaacaacttaaatatactgcatattaatgggaggacattgaaggtaaacagcattcacttttcaaaggaatacgactataagtggcaagcacagacaatgttctttggggccctttaaaactgcaatcagccgggcacggcagctcacgcctgtaatcccagcactttgggaggccgaggtgggtgggtcacctgaggttgggagttggagaccagcctgatcaacacagagaaacccccatctctactaaaaacacaaaactagccgggcatggtggtgtatgcctgtaatcccagctactcgggaggctgaggcaggagaatcgcttgaacctgggaggcagaggttgcggtgagccgagatcatgccactgcactccagcctggggaacaagagtaaactccgtcgaaaaaaaaaaaaagaaagaaagaaaaaagctgcaatcaaatggcccacccatctgatgccgggtcctcaggattcagagaaaatgtgtaccaaaaagcccccaggaaaccataaatgctgagcataggacttgggtgcctctggaatgtccttctgcctcagctactctgagataacatggtcccctgtgttcatggaacccagatggccaaaagtcaatgatccagcacttataagaaaagaaagcgattcaagagcctctgtacccacctaggcctcagcctccccaggacctactcacctatactcttcacaacaggtaacgttgcctctggcacccatcatatcccctgaattcagcatcaggactgatctgccatcagctctggcagggagagtcccttacaagtgccaagaaaaggaacatgaacaatattctgtgaccacagccaacaccacacagaacttcccagaagctctccagggcgagaacaccaaccagaaggaagtgacagcttccatcattctgtgctaagtgagctgagtgagtggccatctctcaccttccagatatttgaatgatacctaccattccagcagccagcacaagtcatttaatatgaatgccagaaacacaatccctgaggacaggtacaggagaccagatgccaggaaaaaccccggccccacccaagagttggggagagcccactgctcctccacccttatttaccacctgagcccctgcacccgccaatcatgctgctcagtctgtaactgcgggtctgagtgagcacctacatttggctgttgaggggcagctggtggagttggcaggcgactctgcactaagttctcaggttgaatgggagttgggtcgagggaaggaatggacgcagagttagggtgaagagttgcggtgggtcagcgggggtgaaaggacatggagatgtcatttttaacaagattgggtgagggtggtaggaaaggaggcagcaagagttcgggacagtttggcaaagacttagggatggggtgtcctcagtacggcaggagacgcaaaggaaggtatacagtgggctaggagactaaggacgagaagacacagttacgacttggaataaggctgagatcggagttatccagaagaaagcggtgagctcaacagggcacctactttgggggtgggtcttagatgagagggcggaggtagaatgtttaggatgagcagatcttggggagctggacaggggatgggggtgactgggataagaaagctgagccagaaaaggggaaacctgaatggtgggtctcggggaggtgagcgcggagcatcgggattaccagaggggtggggagagaggatgaggtgtgtcagggcggggcgaagggacgtggccgagatcggggttggaactggggtaaaatggggtcacgagtgaagctgcatttaagcaagaccgctggtgaggggatgcgggcgcgggctgggggctggacagacggaggggacggggccacagcggcggtgcagggggaaggctgggtcggagcggagcgggcgcgggctggacagggctgagggctctgaagccgggcagtctcagggtaaccaggggctgggaatcgcggagggagcgggaggcccaccgcccgttcgcgcctcggccctcccaccactccgccgccctcctcgcatcttgaccccctaactcaccaagcggagcgaggagcgaggcgaggggggctcccggctgcggcagcccctcagcctccgagccgacgatgcggtctctcggccactgacaacaggaagcagcgccccggcccctgacgccatcacgttggctcggcgctccggccctgcccccggcccgcggtgccaatcgcgcagcccgaaggagccttggggcggggccagctgctcccggaagtccctgggagctgagccccggggcagatgcgaggtctgggaggctggggaactgggggcgcctgcagggcgcagagaggcgacggcaccggtgtcagggagaacgcatccgttaccgcccgcctcccgcaggtctgcgtcaaactagatcctggcttctgggttcctgacctcgtttggcctcagaaccatctgtgcaacattggggctgtcacttcgcctccctcagctgaagagttcccacttgtgagtgggactaataacgcctgccctatctttgcctctccgagggcagcagtgcagcccgtggggcggagcccgggcccaaattggagcctccgcgttgcgctttcaggataaacacagctgttttgaccacactttatcccaagggaacgccttgaggtccccttgggcacactcccgtgtgtaactcgcccattagcaccgcctggcttgaagcttaggggtctggttattctcttctagcccgtgtagaggatttctttcttcctttctgtttttttttttttttttttgggacagggtctcactctgtcgcccagactggagtgctgtggcacgatcacggctcaccacagctttgacctcacggactaagcggttctcccacctcagcctccacgcagctgggactacaggcgtgcaccaccacgcccagctaattttttcttcttcttttttttttttttttttttgcgacggagtctggctctgtcgcccaggctggagtgcaatggcgcgatctcggctcactgcaagctccgcctcctgggtcgacgccattctcctgcctcagcctcccgagtagctgggactacaggagcccgccaccacgcccggctaatttttttatgtttttagtaggatggggtttcaccgtgttagccaggatggtctcgatctcctgacctggtgatccacccgcctcggcctcccaaagtgctgggattacaggcgtgagccaccgcgcccggccaatcttttcatttttaaaaaaatttatttattttgtagagacagggtctcactgtgttacctagcctggtctccaactcctggcctcaggcgatcctcctgactcggcctcccaaagtgctgggattacaggcatgaaccaccacacctggcctgtatatcttctttctaacgcaaaagtgacatttctctttcagatgaactcggaacaaaatgtcataagtggtggccacaggtagtgaagagcagggcagggagtgttggcagggacccatgctctggacactttatacttgcaggctttggtcaattgggagcctagggcctgagtgtggatgaggagaggtactgctacatgccagtcgtaagtgggcacaggggttggctggggaacgggccagttcttggaagcaa

SEQ ID NO: 471 - DNA, 29119 bp, Homo sapiens
  source 1..29119: mol_type = genomic DNA
gggtttctccacgttggtcaggttggtctgaactcccgacctcaggtgatcagcctgcctcagcctcccaaagtgctgggattacaggtgtgagccaccgctcccagctctttcttttctttccttccttccctccgtccttccttcctctctccttccttgtttcttttctttctttccttccttcatttctctttcttttctttttctttctttccttttttccttccttccctccctccttcctctctctctccttcctctctctttcttttctattctttctttttcttgaccagtgtgataatatcagcctcaattttcttcattcctttagctaaaggatcccaggcctaggcatgagggagaagtgtacctgcatctccttcccccttggcctgggagccccaggctgcccttttccgtacagggctggaagtagcctgggagcctgagggctggcagaaggccgtgaaaggggagcttggtcgctggcacagccgctgctatggcagccagagccgaagaaggtcaccattgatctcacatgcacttaattttcccttccttggcatgggacggggttgaccaggagagctaagggggagtatgcgtgtgtgtgtgagaggggagcggtgctgcaggctgcgatgcagccagttactttctctctctgggcctcagtttctccaatgtaaaatgagggcgcatggtataactaaaatcattactctctgctggtccccacactcccactctccagtaaggctgtcagggctgcaagctcaccgcgggatcggggggatggtcgaccctcagatacgggagggattgagcgatgcccaaggagagcaggagaacactgcgcttggagacccctgagagccaggggcgggccgccccctaaagggaccccggagtcccgactctcagctccagctcttcctgtgacaccaccctccggacagagacccaagctccaggcccggccccgcccagaggttccagggagaagaccaggccaccgcccactgcccggcgtcggggaggaaagaggaggagcctctgtgtgcccacatctctggccgcccagggcagctcggctcggtctcgcaaccccagcccactggttcgggagacctcaaaggctccaccgccagcgcccccagcgctcactgtgtgcgccccaccccagccctgcctgcgcgccgctcccgccaccctcgcctcagtctctgggccggaagccccctctcctcccccgccgcagccccctcctagtccctctccctccgccgatgcgggaaaccttctccgccccgtcccgccctcttcctccagttgcatctccgcccggctcctccgtccagtctccaacccaggccccgcccctccccacccatttcccgccctgggccgggcccccggccccaccgccccctccccggccccgccccggcccccggaagcctcaccccgcccccggccccgcccccccgaagtttcttgggcccccggcagccggcgggacagaacgcggagagtcgccgcctggccgggcgtagacgcggtggcagagcccgcgcggcgctggaagcgagtggcggagcggcgggacctcggcggactcgccatggaggaggaggtgagggcggggcccggcggggcgttgggctggggtcctcgagcccctcacggggattgcggtcctgggctcaggccctcgttcctgcccgccccactcccgccagtctcacctcaggaagagcctgggcaaatggggcaggggcgaggggctggatccatatcggggacttcgcagaccgcgtcctccttcattctcgctgactttctcaccagttgtggggcgtcgtggttgttaccgttcccattggattgaccaggagactgagactccagcgagattgatgacttgctgaaagtggcctgggtgactgggctcgaaccccgattaccgtggtcggatcctgactctctctctctctctgtgtgtgtgtgtgtgtgtgtgtgtgtgtgtgtcggatcctgactgtgtgtgtgtgtgtatgtgtgtgttggggggttcctgtctcaaggatcggatcctgactctgtgtgtgtgtgtatgtgtgtgttggggggttcctgtctcaaggatgtgaccatgctttggtggcaggaggattggagaagttgcttttttctcccttgtataagtctctgtatcttttcccccactctctccccgctccacatccatctgagcagctagctgtagggaaggaatcgggagtccggcccacctagggtctgatcttagtccctgccttccccacccgagggctggaccaactgtgtccctggagcctccttctaaccactcaaaacactcttggcctgggattgggtcttgcccctgcccctgccctttacttgcaaactcagttctgccagcagccgctttatccgagggtccagcacgcagcaagcacttaatatatgcctgtggaatgattaagttaaaatgaggggcctgttgggtctagaggaaggtgaatttgtttcttatcccctgagggggtcccagcttcagcccctctcagcccaagggaaggggcatgtctttgcctccttggatggggaggaaagatgaagttctctgccttgggggaaccctggccagctgggaagccctgagtggaccggactgcctgtgtcccttcagtgcccacctcccacttttccagggccatggataggagcagctagtggtccgtcagggctccctctaggccaggccctgcctttctgtgggatggtagataagtcacttcccctctcagccttcatttcctcttctacaaaatatagtgcctgtcctcctcatactcctggcctgacagtggccggttctctcagtgggtgaaggtagggggcaaagtcaggcctctgtgatttgctgcggtttctttctggctgttaggtggggctgccatctgcctgccccaggcccctgctgcaagggctgggctctctggccagggcccctcccctgctcccagaggatgtgggtcaggattactccatctcctgatctgcgctggcccctgattaagggaagttctccggacacctcctgggcccggctcagctctgtacacccttggtcctgaatctctcacattgtcactttcttttctttttttttttttttgagacggagtttcgctcttgttgcccaggctggagtgcagtggcgagatattggctcaccgcaaccgccacctcctgggttcaagcaattctcctgcctcagcctcctgaatagctgggattacaggcatgcaccaccacgcctggctaattttgtatttttagtagacatggggtttctccatgttggtcaggctggtctcgaactcctgacctcaggtgatccgcctgcctcggcctccgaaagtgttggggttacaggcatgagctattgcacccagcctatattgccactttctgactcctagatgcccaaagctctctaaatatctgggccatctaagttcttgtccactttacccaagcccctgcaagcctcacccccacagcaggggcttcctttccctactcccctttggcatccctaactctgctttcctcccacttctcccagtagcttccgcttgttgcactaggcctcagtgcccatctttgtttctctaaaacacctcttaggtcatagccacatgctctgccccatgatcccaggccatcttcatcatctctttcacatggctgctttcagccctcctgctagctttcagcttcctccctgtgcccggccaccctgggccaaggtccctcagcctcagtgacctcctctatgcaacgggcaggctggtagctcttgtcaggctgaggcttggggaggagatgctggtctgggcactgggcatctgcccacctgtgtgctcctggcctcggttcctcctttgtaaaaggaaaagggtgggtgatcgagcaatgtgatgatgtatattcaaaagctgagaaaactgcgaatatcagtgggggtattattgctgccattggagtaagggtggaaatcctggacctaggctttcccttctgtactctggggctctgtcctctgccagcagtcatgcctttccctggcttctaggctctccacttgccctcaccatctagagacaagcagggcagtgtcctgtcccagtactgtttctgtcccacggagtaatctcttgccctttctgggctgtactttctctttctatagtaaaggggttgagggggcaggggctttgataaccttttgtgccttgccttctctggaccaaggcgtgtgtctcttcccctgctcagagccctccccaaaccctaccttctgcaggggtctcccaaacgaaccccaagcccttatctcatcagagagctaggaccggtgcatccctctggttaagtgctatgtctctgccaataggctggagcctctcaagcaggagattacccgctccccaccagacaggggacttatcttatacagcgtctctgttacccacctcagactgaaggttgccctggggcagagcctgtgcttcctctctctcaatgccccggcacaggactctgacacggtggattcttagtagagttgggtcagaacatcactgggttttgtcaaagagcaaaggttgtcataagcttcctgggatgtgaggtgccaaccaagtttcttctagtctctgtctctcgtaacctgtgttgtggttccatctgtccccttctgtgtacagagttgaggtgacctggcttctttttttttttttttttttaatgagtgatccaagggaggcaggctggtgcctaggggtgcctcaggagctgctcacagtgggcaggaaagggcctgggtgaggagggatgggaggggagagggcaaaacaggaagaacagcggtcagctgctcagtgaggagaggaggccgagaaactgggctgagcaggacaaaacctcccctgtgaaccctgccaaggggaggggccccttattaaaacttactggggcatagccaggcccccctggagggagggggtctgaggggcagggaagggggctgggtggaggcaactaggactctggcctccagccagtcctcccctgggtggctgtttctgtggctgggctgtggttcacaccatctgtagcccttcagttgtccccttctccataccaaagtgctgtttcgcctagtcctgccctggtcccattcattcttcaaggacctggacttgtttctgtaggtaatccagtcacagtattctctaggctacatcagcccagaagtgacagtgatctaggcacaagttccagctgtggccctagggagcttccagagggtagaaagttttcaggagaggtcatgagtggagagagtttagaaaggggtgtgagatcccttggggtggtgggtgggtcccctgaaagcaagaggcgagcttggagctcagaggtgggtggctgggcaacagcttcacactccacagacctcactgccttgtttaagagaaaccaagagtctgcccatcaggtggaaggcctggcaggggctggtggtgctgtccttgctgttgccgttgcagtaggagggttgtcagtgtgaaatgtgggggtggggtttcccatttccctgttcttcccttctagccctgggcctatgacagcctgcagggctcgctgaagtagtgttagggccctgggggtgtcagtggtgatgtggggaatgggagttgagtgcatgatggaatgggagagcctttcccttcttgtcaaagggtgctgaaatccctcttctcctggacagggtggctcataatcggccagccttctacttccttgttcctatatctgggaagaccttttttttttttcggagacagggcctcatcctgttaaccatacaagagtccagtggtgcaatctcggctcaccacaacctccgccttcctggctcaagggattctcctgcctcagcctcctgagtagctgggattacaggcgtgcgccaccaccgcccggctattttttgtatttttagtagagttggggtttccccatgttggccaggccgatctcaaactcctgacctcaaatgatctgcccatctcggcccaaagtgctgggattacaggcatgacccaccatgcctgtagaagaagaccctgggaagatcatttggaccaccccacttccccatttctcttgccatctacaagttagggagagaccccaaggtgggaccccacattcctggagctcctggagatctgaggccagcagctatagaccagaaagggcttgtcctgacttgggaactgggcccagggagagggtccctgagagccagagaggatggcagtgacaatagtaacaataatgacagctgccgtttactaggtttagggcatcctgggaactgctctatatgctttgtctttactcagcaacaaatgtttattgaacacttactatgtgccagtcactgtctaggaactgagggtacaggagtgaacaaaacaaaaatcctgccctcgtggagttggattccttacaacttctgctgttagtagctgcatttcacagatgaagaaactgaggctcagagaggttaagtggtttgcttcagtctgcatgactgcagcttctaagcccagattccccaccactagaatgcgcagttcaaaagggggtgggggcccacagtgagaaccaggctggggttcccctgccatgacagagaccagggaagccaggtcttcccagctcctgacagtgcaccacgcttacatctgtctgggcttgttcttccaaaggcagctgtggccacaggatatccctggggagaggcacacctcttttaactggggccccttttttgaattttatgtaaattataacgtagtcaaaattagtccatgctaatttccttctagcagcctctagattctgacacattcttgatcccctctccttcaccccccacttcacactcacgactctgggtacctatcagtgaagcaaagtggttagcaaagggtgtgtatttttattttcatttcacgcgtacctcttgagcacccattatgtgtaaaagaacagggctgggtgctggggacccagaagtggatctgaccccaaccttatttggtaggcatgtatctggcacccagccacccaagcaggcaatcaatgaggcacaagatgtcagtagctggccccaaggctccagggtgtctacccaagtccaagagaagggcttgaatttaactcctgtgccagcctgtggtcaaagacagagtccttggaaccctcaccagatgtggtggccaccctaaggtccttgcctggagtggggaggaggggagaggagcctcctgctttgggtgggaagcggaaggggctgcagagtgggttctctagaagcatagcggtagagaggcagattgccactcagcctgcctgtccttccagtctttgttctgggtggccttcctgggccaccccaacctgaactgggtcccccactgtcctctcgctgccctttgtgtgtttcctgtatagcatttcacacaggttgatgggtatgcctgggtatttatttgttcagctcctattttcccgcactgtgagctctgaggacagagactgccttacttttattctcctgtgatgttgtaagcactcagtacatttgttgactgattgaatgaacacatggaagcagaatggtggagtgggaaaaacgtggggtcagagagacctgctttgaattctggctctgtcctctagcagtggtttgccactctgtcgagtcatcctccattctgagctttagtttgctatgacatgtggataatgaggctaccatcttggaggggagttgtaagagtgaaatgacactatgtgtatcaaatgttatacagtggctcagagtaaagtggctgctgctattattgttgttattagctctgatcctgggttaggaatatctgccttgggggttgtggggaagctcacatattatgatgtcattaggtacttagcctagggacacatcccttgtgtgacctatgaacctgtgacctgtgaccccatggtagcaaccctcatggtatgaactggtgctgtgttacagggtgtgaaggaagccggtgagaagcctcggggagcacagatggtggacaaggctggctggatcaagaagagcagtgggggcctcctgggtttctggaaagaccgatatctgctcctctgccaggcccagctgctggtctatgagaatgaggtgaggacctgcttggccctgagattgggggttctgggacaggggcaaagtgagggcattcaagttagtaggaggaccctgggtctggggccagaagacctgctctacttttgccatgctgtgcaaccttgagcgagtacctaatcctctcttgggtctctgtatatggggataatacctccgaggacaaatctagggtttctagatgagagttcttttcttatttttttaaacttaattcttttttttttggtgatggagtcttgctctgtcaccaggctggagtgcagtggcgagatctcggatcactgcaacctccgccgcctggttcaagcaaagcaattcctctgtcttagcctcctgagtagctgggactataggcatgcatgccaccatgcccagctattttttgtttttgagaaagagtctcgctctgtagcccaggctggagtgcagtggtgcgatctcagcttactgcaacctccatctcctgggtcctggttcaagcaattctcctgcctcagcctctggagtagctgggattacaggcatgcaccaccatgcccaactaattttttgtattttagtagagacagggtttcaccaagttggccaggagagtctcaatctcttgacctcgtgatccacccaccttggcctcccaaagtgctgggattataggtgtgagccaccacgcctggccctcttttttttttttgagatggagtttcgctcttgttgcccaggctggagtgcaatggcacgatctcagctcactgcaactgccgcctcccaggttcaaacaattctcctgcctcagcctcccaagtagctgggatcacatgcgtcagctaccacacccggctaattttgtatttttagtagagacagggtttcaccctgttggccaggctggtctcgaactcctgacctcaggtgatccacccacctccgcctcccaaagtgctgggattacaggcgtgagcctgcgtgcccagcggagagttctttgaactgtatgtgcatctagtgtgcaagtcttttcctgtccctgggcaaggttccatatgagtgaatgttatggaaaactgaagcctgctccattcagcagtggtagtagaaataataattagcaggccgggttgtagtggcttacacctataatctcagcactttgggaggccgaggcaggcggatcacctgaggtcaggagttctagaccagcctgaccaacgtggagaaaccccatctctactaaaaatacaaaattagccgggtgtagtggtgcatgtccgtaatgccagctactcaggaggctgaggcaggagaatcacttgaacctgggaggtggaggttgcagtgagccgagatcatgccattgcactccagcctggacaacaagagtgaaactccatctcaaaaaaacaaaaaaataataagtagcactcgtacttgtttggagatatgctcttacatatctccctatgacaaattgcaatagtcccatgagagtggtcttcatgttagatttttacagaagaggatactgaggctcagggtgacaagatgactgttcagcatctcccagtgaatggaggagttaggtctagaagcaagtccagcgtgctttctaccaagagacgccagcaagtaaactccaaaacttatttttgttagaaaatctctaaaatatgttaaatattctccgctttcttcaacagaagattctggcctaaataaaatctttccctggtggctcagtgtcatcacctgtcagacccacctgcagagtgggttctctagatgcacaggggtaaagaggcagattgcctctctgttttgaactggcaggaggctgtacttctcatcttttctttctcctttaacatcaagctgctggttgcaacttctgctgtccttgtgcctcgaatagccctcacttcttcccacttcagatgcttgttccccttctgatttcagcaggcttgggatttggacaaccaaggatgctaagcttgcgtgttaactaagagtcaattaagatgtaggtgaagacttgaggaagaaaagtggtttttacttgtagatgctatttgtgtgctgtggttgaggctatcggagggcccatccactgaaaacagggtagcaatatatgcctttgacaaatgaaatacctggggaagaattggcctgggggcagaagggggagcctgcctcttcctcatccacctctcccagcctgcctcaggctatcttggcaaattcacagttgtcccaggacaagaaagattaggcaacctggatccaaagtgtttaaaggagctgcctcggagaaacaccttgtctgacctacctgagttgctggctcgtggagtttgtttgggtgtcagagaagcagtgggaagagggcaagggaatgagggtgcgtagacagcacccccagatgttctctactgctgctcccaccaaaataggatgtgccacagttgagaatgaggcagcagggggaccttttttccaataaagggggttgtcacagcttcttccagtgccagctgccatgagatttaagtaacaggcttcagctgtcagcctgtcaggtactgtcagacttgtcctaaactgcctctctgcatctggccacagctgggaagcaggaaggatttcacatctcccaaacatgaaaaatctaaatcatgcttttttccccttgtttgaaaaagattgctattaaaaatgtaaatgcaatttcaggaacttaacacttaggggtgggggagcttggccctggagtaggaattgagaaatgcttattagctcaattcctctttctgatgtaaggaactaggcgaatgcgaatggctcttggctgtttctttgctgtcagagaggctgacattccaaagatgcttccctcacccattgcctactggtttatccgtttttctgagctgcagaagagctgggatgattcagcgtcttggggtggggtggagaggagacccaggacaggcagctattgggagcttaatggtagaggtggatggactttttgttcccaggcagaggagggtgtattcgggccagtggcggtccagttagtggaggcctgtggacacggggcaagtaagctgctctctctcaagcaaggattcttccccgggcagtttccctgctccagattcccggggaggaggagacttcctgagttctcaatctggataaggcactcagaaaactggtcctacatatgttctgcttgagggctgctgcttgtagggtgcagttgggggaacagaaggataagcagatagatacacagagaatggggtagagaaagatggccaagcagggagtcaggactgtgttttcccatggcaggactcggctcctagcacctcatagggtgtctgcatcttgcaggtgttttgtagatgtttgcatccccctggcagtaaatgatgggatggagagcactcaagttcaggggttcatggttgggggcaggggagtttctcagagcaagaggatttttctggtccgtctgtttagttgaggaatctggaaggtactggaggctagagattggaaagggatgtatggatggaagcaaaaatgagaaaagatacttgatttaacctggttgggagagataaggccaccttggccatctcttcccctttctctgaggggctgacgagagagtcgattagtagttatccacattagatatacagtcatctgctttaaaatatcctgaggtctgggccttgcaccccaagagattgtggtataattggtctgggatgtcgcctgggcattggggtttttaaaagctcccaggtgccaccaaggctgagaacctctggtgtagagcagtggttctttttttttttgagaaggagtcgccctctgtcacccaggctggagtgcagtggtgctatctcggctctctgcagcctccgcctcctgggttcaagcgattcttctgcctcagcctcctgagtagctgggaccacaggctcatgccaccatgcccagctaatttttgtatttttagtagagacagggtttcattatgttggccaggctggtagcagtggttcttaactgttcgcatccaggccaggcttggtggctcatgcttgtaatcccaactctttgggaggctgaggcaggtggatcacttgaggtcaagagttcgagaccagcctggccaacatggtgaaaccatgtctctacaaaaattagccgggcgtggtggtaggcacctgtaatcccagctactcggggggctgaggccggagaatcgcaggtacccaggaggcagaggttgcagtgagccgatatcatgccactgcactccagcctgagcgacagagtgagactctgtctcaaaaaaacaaaaaacaaaaaaaattcgcatccatcaaaatccctgggggctagttagaacgcagattgccaggcccaccctcttaggtgtaatgattgagtggggatgaggcctgggggtttgcatttctttttctttttctttttttttttttttgagacagagtctcgctctgttgcccaggctggagtgcagtggagcgatcttggctcactgcaagctccgcctcctgggttcacgccattcttctgcctcagcctcccaagtagctgggactacaggtgcccgccaccacgcccggctaactgcccggctaatttttttttgtattttttttagtagagatggggtttcactgtgttggccagtatggtctcgatctcctgaactcgtgatctgcccgcctcggcctcccaaagtgctgggattacaggtgtgagccaccgcacccagccgggagtttgcatttctaacaagctctcaggtggtgcgaatgctgctggcctaggtcccaaccttggaggacccctcgtgcagagcaacctactgcctgtgactggaaggagtgtgctgtgctggaaagggccctggcctgggagtcagaggctgtggtttgagttggggccctgccccttatatttgggtctgtgtgcctagggcaaatcccttcacctccaggcctcattctttccttctaaaatgaggcagatatggggctgcaggctttcagggttattgtgaggttcagagactcagggatgcagaagtgctcactaagtgtcagatttcttctgttaaacatcagcaagggtttccttaactttttggcccgtcccagggtggtgtaccctcccccaccaaaggatctgcttctgcttccctggactctcctggatgacagagtgccacacccaggaagttgttccagttgggtcttccctggaagaggaccagttgaccaccactgagggaggagcttttcccaggcagcttgctggacaggcacctgatgggtggagcctgtggagaaaacactcaaatgtcaggagtggtgggcaggaagacagtctggctggtgtccagagatggccgggaagaggctgggcactgttctggccactggccctcctaatgatgaggcctccgagtggtggggtggggatgggatgcgcttcaaggagcccttgcctgttgcttgtatgtagcctgcagccttggatgaggtgctgctctcccaagccagggctccgcagggggtgatgctgagtgaggagcacaattcaggatggctgtgctgaaggcagggcatgtagccccaaatttgccttgttcacacttccctctggctcttcctggaaagtcgttgtcccccgtccccatcccactccctgcctgccattttgtggcatcctgcattcttcttctggctttctcttccacagatctctgcctggcctctgggcatggctggaccccagacagccttttcttatcctctctagcttcccctctgtttcctcctctggccttaggcacatacgcgcctctgggctatgtgcccatctcccatctggatggggagccttgtgggcatccctccagccagcatgcacttgccagggtctggacaccacatcttggtgactgattggcagcctgaggtcctccctctaaccaagtgatgtcctcgctgagtgggatcagggtctgggacatgagtagttgagggtggtggtgggtctgactgtcaccagctcatgtcccttctgtctccctccccaggatgatcagaagtgtgtggagactgtggagctgggcagctatgagaagtgccaggaccttcgtgccctcctcaagcgaaaacaccgctttatcctgctgcgatccccagggaacaaggtagggcgatgcctgctgctgccccatctccctctagcccagagtcagcttgggaggcctaagcaggtttaaggcaggcctggccccttgaaaaagcctgttttccgttgcgtgtggctgaggctcagccctagcagccaccataggtcagacctttgctcattttgtctcggaatcttccaagcccctagttgataagagatgcacttagggctctgttgagagacctctgctccccttttcctcttgcaggcccagggcctccatcccaggctgtagttggaaagtagcctttgggaggtggggcacttggctgtaccccagaccctgggggaggcccagggctgaggcaggagagctgtggttgaggcctccaccctgccaggcctcaacaccgtgatgcagcctggggcagagggggagtgtgtggcctcccttcatcccaggcctttgtgggtgggcccaccctggactaaggactaggaggcctgcagccccccagctttcctccccttgcactttcctttcttggctgtagctggggaaggtccctggcttgagagagtctttccctgggacatgctgtgtgtacagatgaagtttgctgtttgcaccacatttctctggcggggagtctggtgggtgttgacacatggtgtagcttcacagatgtcaggagcgagttcagatttgaggctggcatgcacagcacctctcgccagcttgcacccatctgcggctgggccattccttgccttgtcctctgcatgtcatgtggagcctcgcagaatagggctgagtcacagaggctgggagttggggagcaagtctggtctgggcctgctggaggccattctgtttctcccccagctttaggggataggagcccagtcctctgcagaccctgaagaccacaatgctttactcattgaccctttgtcctactgtgcagggggtgggggcgcagaagcaaccaagatagcagtggagggggctgtggagctgtgatactagggagctggaagtgtatcccagggtagcggctggtataattatagtgttatgagggctcatgggactgggcccaggtttcacttgacatctgctgcttagggctctttgaggacaaaaagagtcacattttaatcttttcaaggcctggagcccctaccctgtcctggagacccacttccttcctgagtgggcactgtatatgtggatgtgtgtttgagagagatgagatgcaaagtatgttctgtgtgaagatctgccacctgtgtgtctggcccttatgtgtgtatctttttttaatgcaggtgagtgctcacctggccgtgtgtctgtctgggtgtgtgtcttagtatgctatgtggatgtggggtggagggggacctagcctctctggcctctgcctgtgctgttctgtgggccatctcttccccagctctgagaatcagctggtgatagactaggtgggcttggctcagctcagggtgggacatcaccttcagagaagcctgtttgtgcagctgtgttctcagctgcttcagccaacaccctccctaccagcccccaaccctgcaagaatttaggctggctctgagaacaggacaagaatttaggctggctctgagaacaggagatggggctgtggagcaagtggtgggtgctgcggatgaaacagtgcatcctggttccagctcaagggtccctgaccctccccaccccaggagctcacacagattggggctctccagaggtcagttggtggacctggcccagggcaccacattcccacatcctctcaccctcctttctcagcagcctgggtgttccccgtcctcagtgaggcctccagccggccaggaggtcacatgaccctggctgtctggtcctgaggccgccttttttcccctctaatcaaataaacaaagactccaatgtcttacatgcccctctccccctgcttctccagccccacacccctgcccatgaggtcacaggcagacgctgccaggaagcagggtggccactgctgggccttgctgccctgctggtctcagccagcttggccctttcctctttcctgcctcctctcttcccctcccacttttttcctctctgccattttgtccttaaccttttcccaggccttgtgggcctagtctgtggccagtcctgttagcatctaagctcctagcagtgcctatgtccctggggcttcttggaagttctcagggcagggacctgtacagcctgtggcccttcaggatggtttttggggagaggcacagcttcttggtattcttattttttgagacaggatctcactctgtcacccaggctggagtgtagtggcattatctcagcttgctgcaacttctgcctcctaggctcaggtgatcctcccacctcagcttctgagtagccgggactgcaggcacacaccgtcatgcctggctaattttcatattttttgtagagatggggtctcactatgttgcccaggctggtaacttcttggtattctaattgtttctattgtggtcatccttgtggaatgcctggctcgttcagccagatacagggttccttaggagggtggagctgggtcctgtttaaccttgtcttccttctcctgtgggagccttttggcttgcacaataggtcttctctgaggccatttctgcttctcacaagggagcagaagagagccgaggcagcctgcttcaggtgggctgggccagtggggaaggagctgcagtttgggctgggtccagtggttctgttcttgtccctttgaggtccagagtaatgaagcgagtagaacttggtaatctgacttctaggcctgctcttctctggcctcctcttgttccattggctcctgagttcagctgtacacttttcaagctccctggatgctaaatcctgtaccatgcaggggtcacaccagctctgagcctgtgaataggaggagcagctgggtagaagggctggccccagactccctttctagcaggtcccgtcacagagttgggtggccttagcgaccccagatgcagtgtggtctgtctctgagcccccagcagccctgatggctgagctgaggcagttgccaaggtgccctggggtttctgacttaactgaagatctgcttccaggatcaaatttaccctggtcatgcaaatgagcatttggctgtgcctggcatggtgggggtgggacccagggccctgcatgaggaggaggcagtggcagccaggaggaaattatataatgaggatgctgagggggccaggccgacctcggtgttacataactggagagtggagggaggggaggtactatctaacaccagggtggaggatgggcaagctggcgaccgccaacaaagaactagggcatcttgaggtcagagagtaggcagtggtccaaaaatggtgagggaaggaaacttgagccagttcattaattttttggctcattcattcaagaactatttactgagcacctactatgtgccagtccctgcttttaatcatgtttaatttccccatcattgcttggtagtaggcagtgttatcccatcttacagacgaggaaacaaactgttttgtccagagggaaggcaatggtgctaattcctattactgagtattcactctgcctagctccagatttagtactttagatatatcttttttccctcaattaaaaaataaaaaactgtggtaaaaaaaaatttaccatcttttccagtttgaaattgcacaattcagcggcattaaatacattcatggtgttgtacagctatcaccaccatccatcacataactctccatcgtgtaaaactaaaactctatgcccattaaataataatgccccattgcccctctccccagcccctggcaaccaccactctcctctctgtctctatgattttgacaactctaggtacctcatataggtggaattgtacagtttttgtctttttgtgtccagcttatttcacttagcacaatgttttcaaggttcatccctgttgtagcatgtgtcagatttttcttcctttttaaggctggctgataatccattgtacgtatggaccacattttgcttatccattcatctgtcagtggacactgaggttgcttccaccttttggctgttgtgaacaatgctatgagcatgggtgtacaaattggatacatcattttaaaaatgatcttcatggctccatgaggcaggttctggtggtattctcttttacagttgaagaaactgaggcctgaggtcagacacctgtaagtggtggactgtcctgctcagaggccctactgccttgtccactgcgtgaggcagcccctcagtttccatgacctcactccttcctcttatttcctgtctggccattgggcctggcagggtcagggttctctgagccaccctctgattctaacaggagctcagagctcctacctgaattgggaaaggactcatgggtggtgtggggtgggtttgaatgtagactggggctattcctacttttcagagtaaacggaagcccagagcccaggcagctggcctgggggagtcccatggagctggaccagatccgggctctttccacaaggccaggctgattcgaatctagacccagctgcatactggtgggcagtggggagggcttctctgtgagatctttccctttcctggcccaaagccccagtgtcatacttaactgtggggtcattttggtttgactttgggatctaggtaaggaagcctccttaagatgccaaatgtgagctttgttaaacatctgccatctactccatccatcttgcccacaggtcagcgacatcaaattccaggcacccaccggggaggagaaggaatcctggatcaaagccctcaatgaagggattaaccgaggcaaaaacaaggctttcgatgaggtgcgatgcagtctgtggacatggacagctctgtgtctcctttcccactgcgtgtgatctaggagaggaccctgcccctccttaccccagactaccccttgattatgtcactgctatggggcattgttgttaccttctatagtcctcactacagcccctcatagtaggtggtgctgtccttgttttacagatgaaatggaggcctaaggaaattaagtaacttgtcttaaactggaaagcagataagtggtgggctggaactagactggtggcagcatgcatcctttctaagcctggcctcagctggaagcagcaggtgggcccaggccagagagtgctgcagagtgagccgacagctcccttttcagtttgaccatgaagtccagggcaggctggctctcagctctgggcctccctctctgtctgcaatgaccattcagccctgcagacctcagccccctgtgctgtactggggactgtggcaacagtagccacaatctggcttggggcaggcagagcatcccatggggccaggatctcctaggaagatttgtctttgacatcacggatctttggttatttgggctaaaatggacctgggggccacctacagtgatgccttggattatgtcaaggagcaaatcttcccaagcaagtcccctcttaatacccaggttccccgactcccagcccatagctcctatgtcgtgtcctgtgttacatgtcatgctcagcccttcactacctaggggaaaagtgtccccgttccacgggagagggatgatgggacatatcatagatattgggggaggccataggagccatgggctgggcctcagcccactgagggacagagggacagagggacagagacagctggagtcacatgtgggcctgagcccccactccccatcatagggccaggctgctccagggttctgagtctggacctcccatgtgactcttactctgagacttcccagccaatcctgaccccttctgttaccctcagagagaagatgctgacctccaggctcccagactcaaggggcagaggccctgctctctctctgggctctctccaggggtcctgggagggtggcagaggccagggcagaccttttccagaaaccaggtaccaggggagcataggctgctttcaaccttctctcctagctaagccccaaagccacctcagggctgcttatatatttgtgatatactcaggggcaagggccgatggcccatatttgggcaggaagactgaggcaaatggcagctgcagagagggagagcctcagactttgcaagagactccaggggcattgcagagttagagaagcagaggccagggcagggagattcccagagagggcagcggtggggcactgaccctggctctgagccaggtccgccctggctacttcccacactccccaaggcttggcaggggctgatctggttccccctccctccaggtaaaggtggacaagagctgcgccctggagcatgtgacacgggaccgggtgcgagggggccagcgacgccggccaccaacgagagtccacctgaaggaggtagggccttacccagtgtggatgttggggttagttgagcctaggacctcagctcctctgggcggcagccaggcttggggccacatttttcctgaggacacctggagctggggcttcctgaggagtagacaggaagtgatggggcacctgtgttacacgtgctcagggtatggatgtccttgagcctgtagccttttccatttgttcaatccacacacaaatgttgaatctgtccttagccagagttggtgccagagggaaactgaagcccatgaggccagtccctgcccctcagagctcgtcttccagctgaaaaataggcctatcccacagactgctccatgcaaagctgtgtctgatttttgtgcggaggaaggaaggctctaggaggtcagggcaggagggaccacaaggagccactggcattttagctgacccttgaaggatgggaggggttcacttggtggacttggagtcaggggattctctgtggagggagtgctgtgagctgaggcacagcgggagggtttgaggtatgcggagcagctccatttgcctgggagatgggtctgagaagggggttgtggggaggaaattgtggaggccttggtgaagaagctggagacaaggaagggagagtgcgtttcagaggtcagtttgaggctctgggtaggatgggttgggttgagagagggaaaggcaggggccaggaaggaggtgggggaggcggctttccaggcccctggaggggatgaagagggaggggttgatgggaggatgttaggaagcaagagccacctgggcttgtgattgagtcaggggattggaccaagggaaggttgtctgaggttccccaagcctggagactgggagcatggaggccctgggcacagggaatttggagagggtatgggcaatggggaggggggaagggaggagactcttttagaccagtggagctaatgctgcaggggaggattttggaggccaggaaagaacctcagcaagtgctacatttagggactggagggaggtcagctagcagggaaccaagaaagaggaagccagaggcaagtgccacatctggagagagatgggcacaagacctggtgggcatcagccaggttggcagccgcaagtcacaagggcaggaccaaggacaaggcatttacaacatattttctttttcttttctttcttttcttttttttattattatactttaagttttagggtacatgtgcacaatgtgcaggttagttacatatgtatacatgtgccatgctggtgtgctgcacccattaactcgtcatttagcattagttatatctcctaatgctatccctcccctctccccccacctcttttttttttttttttttgagattgagtctcgctctgtcgcccaggctggagtgcagggtgcaatctcagctcactgcaacctccgccttccgggttcaagaagttctctgcctcagcctctcgagtagctgggattacaggcaccctccaccacccccggctaatttttgtatttttagtagagacgaggtttcaccatcttggccaggctggtcttgaactccagacctcgtgatctgcccactttggcctcccaaagtgctgggattacaggcgtgagccaccgcgcctggccttgcagcgtattttctaaaaggagtcgatttagggctgtcccggggtgcagggctgggtttgccggagggagggacccaaggtcgtgggaggtctgtttttgagttgcagcagcctgtgcctgtctgtcagctgagggataggatcctgcagagggagcactgaggtggccacagagaaaaggaatgcctgatgggggccggggacggatgtagggagggccagccttggagggaggggccctctgacagaagagttcagggaggcgctgtgtgtgtgtgtgtttgtgtgtgtgtgtgtgtgtgtgtgtgtgtgtgtggtgtgttaggggtgactttctggtggtccccagtgcctgatgtcagccaggtcctgtgtatgtataaaagggagtgagagcaacaaagggagatgggcatcgtggcacatgcctgtggtcccagctactctggaggctgcagtgagctgtgaccatgccactgcactcagcttgggtgacagtgcgagaccccctttttttttttttgagacggagcttcgctcttgttgcccaggctggagtgcaatggcatgatctcggctcactgcaacctccgcttccagggttcaagcaattctcctgcctcagcctcccgagtagctgggattacaggcatgtgccaccacacctggctaattttgtatttttagtagagacggggtttctccatgttgctcaggctggtctcaaactctcgacctcaggtgatcagcctgcctcggcctcccaaagtgctgggattataggcgtgagccactgcacccagccagccccatctcttaagaaaaataaggtggcaggggagagtaaggatcccagccaggacccccaccatctgagggaccttgggaaaggcctcctgcccagccctgctggggcctctgaggctctctgggagggtctcatgactgtgggactgctggatatccctattggtccctggagcctggtgggggtgggtagctgccttctggtgcagctgttctctggcagtcagctgtggtctgggaccacatctgatgacatgaggagagtgggcacaggctgccaagcagctggacaggcaaaagctggagagaagctggcagacggaacagaggtctccaggaagggcaagcagaagtcagtgagcttgagatgaactggaagaagtatgtttgagtcctggtcctgtctctgactgaccaactggttgtggggaccctgggtatggtgatgggtaggtgggttgcagagaagggaacctctgaaggccatacagctaggtaggggttagatgcagggctggaactctgtcccctgccacccaggcttgtatagtccagtccaggtccagtatcccagaaaccagcctggggctccaagaggaccctggctgtgactttcctggcctgtgattccaaaacagggaattctttggtggtgagggaaaggagaggaagattcatcaagaaatcactttagcttctaattaagtagccacagaagccaggacagagggaggctggggagctgggggcctggacaacctggatgggagagggtaagaactcgtgtcagtgggcacacctgacccaatggctagtcagccaagatgacacccatataccatcccccccaccaggtggccagtgcagcttctgacggtcttctgcgcctggatcttgatgttccggacagtgggccaccagtgtttgcccccagcaatcatgtcagtgaagcccaacctcgggagacaccccggcccctcatgcctcctaccaagcctttcctagcacctgagaccaccagccctggtgacagggtggagacccctgtgggggagagagccccaacccctgtctcagcaagctctgaggtctcccctgagagccaagaggactcagagaccccagcagaggaggacagtggctctgagcagcctcccaacagcgtcctgcctgacaaactgaaggtgagctgggagaaccccagcccccaggaggcccctgctgcagagagtgcagaaccgtcccaggcaccctgttctgagacttctgaggctgcccccagggagggtgggaagccccctacacccccacccaagatcttatcagagaaactgaaagcctccatgggtgagatgcaggcttctgggccacctgctccaggcacagtgcaggtctcagtgaatggcatggatgacagtcctgagcctgccaagccctctcaggctgagggcaccccaggaactcctccaaaggatgcaacaacatccacagcactgcccccctgggacctgccacctcagttccatccccgctgctcctcccttggggacttgcttggggaaggcccgcggcatcccttgcagcccagggaacggctatatcgggcccagctggaggtgaaggtggcctcggaacagacggagaaactgttgaacaaggtgctgggcagtgagccggcccctgttagtgccgaaacattgctcagccaggctgtggagcagctgaggcaggccacccaggtcctgcaggaaatgagagatttgggagagctgagccaggaagcacctgggctaagggagaagcggaaggagctggtgaccctctacaggagaagtgcaccctagggccttctgggccagaggcaccatcccttctggccatccatcaagtccatcaaggcccagccctgctgagaaatgtgcttctgcttctacagcaatggctgcaggagggccattgggcatgtcagggtttggccatgacccgaagagactcctggcgtccttcctactctgctctggccagtggtgccaggtgccacccagggctactgcctggctatctggcctggcctctgggctggggctggggctgggagcacacacgctgggacctatgtgtttgtgtggtcgttccaaactgccccagggctttgggggcggcacttggggtttctgggaatgacatcatctctgttccccatccccagtagtttacattcctgacttctgaatacagcacagctgagccccctgcagctcccatctccagctattcctaggcaaagagcctcatggctaaggcagcctcaaagccagcccctcctcccacctattctgagtagctgcagaggccttgggtccaggctctaggttcatccctcagttggggggaacgtaggacccagctggagcctcttgagggagatgagaggcctctttgtgaggaggacattagctgtgtggcctctctctctttggccctgtttccttttttgcaaaacaaggacattttctgcagccccttcctctcagtgagctatgattggagggcttaggtctggaggattcaagagtggaagaggaatttaaggggtcccctagtctagtctctgcccctggatagtgtccagccttgtatatttctgaagaggtggatcccagagtggctctgatgtccacattagaaaaacttacttgtaatgatcatgtcagccttcagaagagaatccccaccaacttctgtgcctcctcagatggggatttatctggatctctgtggttccttctcagccgaaacaggtccagtatcccagtcatttcttcaaatgctgataggggtatgttggaatccgaagccacttccccgccttcaagccccagatgggctgctctcctgtaactttctaggagaagagacattttcttctttccctttcctggtccatccctgcaccctggtcctctcccagcctctcccccacattgtccctgactctaggggcacatccagtctccatcgtgctgcagcagctggactgagggcagagcctgtaggtgcagaggccctggctcccgaggtccagccactctccctggggcctctggggtgagagcagcttccgataggacctgcccagatttctgcatgtgcacttttgtttactgaaagagagaaaggggggggtcacagcaacatgccctggcctttctgctctgttccccaaccccactgaggcctgctgcacaggtcaatgccttcgttatcgttattgtactgtcactttgttcttgaggtagtagtcaaggatcaggaggggcagatgtcttctctgggctgcgtggggccggagcagaggtgagcagcaatgcactggttcgggagcccccatcagcctccttgtgcaaactgggcccccatgccacagtctggctttccctccatctgccccaggacaagagcaagaaggacatcagttgcccagtcatgtgatcccctgccatcttgccttaggaacagccttcccccaccagcagccatggctggctggggctttagccaagccacctactgccaggaattggagcctcagttccctcctgtgtcaagtagctaactgcagcagctggactgagggcagagtctgtgggtgcagagaccctgcatgtaggtcacaggttgaggcccagccactctccctggggcctggtgggtaggcaagtagctctggggccacctcaagtgaccaaatgctattaatttccatcctttagcaggctgggccctaggcaggaagctggcttctgggagaggagtgagaacgtgcagggcctgcctagcttgcgtgcttgaggaaggtggcattccgtgcttgcctccttgaggagggtggcattctgtgtcttctgcttatgaagcgcctttcttaaagtttggcaataaatccatttttatggaacttcagtgcctcaagcctgtttgttgttgtgggtgccagctccagggctgcccttctccaagacagcagttggtgattggtatcaccagtcctccaaactcggtactagggcccccattccataagctgggctgggacactgcctgctcctgggctccattattgcttattattattattatttattttttttttttgagatggagttttgctcttaatgcccagactagagtgcagtggctcaatctcagctcactgcaacctctgccttccagtttcaagcgagtctcctgcctcggcctcccaagtcgctgggattacaggagcccgtttttttttgtatttttagtagagacggggtttcaccatgttggtcaggctggtctcgaactgctgacctcatgatccacccacctcggcctcccaaagtgctgggattacaggcatgagccaccacgcccggaccctattattattattattattattattattattattattattattagagatgtggtcctactatgttgctcaggctggtctcgaactgctggcctcaagccatcttcccacctcagcctcccaaaggggattacaggcatgagccaccttgtgcagcattctgttcttgctaaactcaggcctttctgatatatacccccacccccagtgtttctacggctgggggctaagtgtcgcaaggaacaatagttttcaaaaaccaaacttttcatttggaaatacttttaaacttagagaaaaattgcaggaataagaatagtacaaaggccatggtatggtagctcatgtctgtaatcccagcactttgggaggccgaggtgggtggatcatgaggtcaggagttcgagaccagcctggccaacatggtgaaatcccatctctactaaaaatacaaaaatcagccgggcgtggtggcgcgtgcctgtaatcccagctactccggaggctgaagcatgagaatcgcttgaacctgggaggtgaaggttgcagtgagctgagatcatgcctctgcactctagcctgggcaacggagcaagaatctgtctcaaaaaaagaacagtgcaaagaacacccatttactctagcaagattgacctgttttctcttttgagcactttctctttttcacatatacatataattttttttctttgagatggagtcttgctcttgttgcccaggctggagtgcagtgtggcacaatctcagctcaccacaacctctgcctcccaggttcaagcggttctcctacctcagcctcccgagtagctgggactgcaggcacacaccgccacgccctgataatttttgtatttttagtagagacagggtttcactgtgttggccaggctggtctcgaactcctgaccttgtgatccgcctgccttgccctcccaaagtgctgggatcacaggcatgagccaccacgcctggcccataacttttttctgaatcactggatagttggttatcatg

SEQ ID NO: 472 - DNA, 161952 bp, Homo sapiens
  source 1..161952: mol_type = genomic DNA
gggtgctgatggtgcccgcagctgccccgggaagctgggaggcatttgtgcatcctctgggaagccccattccgagaaatcatgaacctattccccagtgggcaatgattccctgtgcttcagaaattcttggcggctgtgggggcaacccagctgttattcaccctctgggtgaggtggtgagacctcagggggtccaaaggataaaagtgggtaatgatgagacagatggagagcctcgagggaaatacggggacttgggtctaatagtagaaagcagggcgggggctggttggtgcatttaacttgaggaacttttcagtctcactacagagaatgatctctgggggattatggcaatggccacaggtggcacttaactagagccaggtatgtaagaggccctggggctagatatggattcgaatctcggctctgatatctaccagcagtagaatgccagcacgttccacaacctttctataaccattctcctggactactaagtagggatgacaataacagtcactaattaatagggctgttatgagaattatgagtcttaacccatgtggtgagttcacaagcgcacccggcacgtagtaagtgctcagtaaatgttagccccgctcattaggttagatggtgagcagaactttccaagtgctaggcttgagagcctgggactctgttgccaagggagattagagaacctttgcaaatatgggcgctccggccctggggattgtccagaacgagagtgtggcgcctgcctttctgccacctcactcatccgacccggggaaacccacaccctgtcacaggggcgccttggtccccggagtctccggctcggccatgtctcccgcgcgcctccccggggcctccctctcgccgctccacacctgtcagccgctctcgcagcagccctgtggcccgagcccggggcctcagctgcaaccccttcgcaccctggatcctcgctccgcgcgcctggcgtatccccgacccggctgctgtcgtaaacaaaaccgggcgttggagcagcaccgcgggcggacgggcgcgggagcccgctccgtgcgccgttagcgcgccccgggagccccaggcgagccaagggggcgatggtggcggccgcggcggccgcggcgggcggctgagctttgttatgaatagatgaaagaggccacctacacagtaacccaaattacgagacctccctcctccctatctcaccgaatcaagaggggaggggagatgggcgtggagggagggcgggcgggcgggcaggaggcggagggcggaggaggaagagaggatgaggaagggggccagttgcatcccactttcacaatgggaaagtgaaacgcacaagcgcacccaacctctccagccctccccgcccgcctcgctcctctccgcccgtcccctcccttcccctccgcgcctccccgcgagcgccagcgctgcacacaggaactctccggcgaaggagggcgaggaggaaacggtgccggagcgcgcagggcttgctgccgccaccgccgctgcacaggctgccggagcgagcctgccgcgcgccgccctccccgctctccttcctgggcgagctgcggggatggggcggccgcgggagcccgagcgcgcgcaggaaccgccgccgccgccgcccgcgtctccgttgccgcgcgcctgagccgccgtcgccgccgcgcgccctgcccgggggcggcccccccagccccatggaggtctcccggaggaaggcgccgccgcgccccccgcgccccgcagcgccactgcccctgctcgcctatctgctggcactggcggctcccggccggggcgcggacgagcccgtgtggcggtcggagcaagccatcggagccatcgcggcgagccaggaggacggcgtgtttgtggcgagcggcagctgcctggaccagctggactacagcctggagcacagcctctcgcgcctgtaccgggaccaagcgggcaactgcacagagccggtctcgctggcgccccccgcgcggccccggcccgggagcagcttcagcaagctgctgctgccctaccgcgagggggcggccggcctcggggggctgctgctcaccggctggaccttcgaccggggcgcctgcgaggtgcggcccctgggcaacctgagccgcaactccctgcgcaacggcaccgaggtggtgtcgtgccacccgcagggctcgacggccggcgtggtgtaccgcgcgggccggaacaaccgctggtacctggcggtggccgccacctacgtgctgcctgagccggagacggcgagccgctgcaaccccgcggcatccgaccacgacacggccatcgcgctcaaggacacggaggggcgcagcctggccacgcaggagctggggcgcctcaagctgtgcgagggcgcgggcagcctgcacttcgtggacgcctttctctggaacggcagcatctacttcccctactacccctacaactacacgagcggcgctgccaccggctggcccagcatggcgcgcatcgcgcagagcaccgaggtgctgttccagggccaggcatccctcgactgcggccacggccaccccgacggccgccgcctgctcctctcctccagcctagtggaggccctggacgtctgggcgggagtgttcagcgcggccgctggagagggccaggagcggcgctcccccaccaccacggcgctctgcctcttcagaatgagtgagatccaggcgcgcgccaagagggtcagctgggacttcaagacggccgagagccactgcgtaagtcctgcccccggggcgccgcggagagcgctgctgccggggagccgccgccgccgccgaggcagaacgagctgggggcgagcggcggggcgggggtacagccgggtgacatttaccaggtctcaggttcacaccgcgggcggccgtccgaaggctcctctcggacggtccccgagacctggagcacggcctgaggtccccaaagggagagtgtaaaaaggggggcggggagggttggagttagactcaaaactctagtggctgcatcccattgccatccttccctgtccaaacggggacgcttgtttggggctgagtctcctcgcgcagcccctctttcccattcgcttctccagacttctctgtgccccttccgtgtagtcccagcaggcgtgtgggtctgaccctcttggtcaacagttagcaacacagtgccctcggcagagaagccattgaacctaaagggctccctgccacaccccagcctttgtggccccctgtctccgccccccaccggcaacgcaagtgctgtggtctgaagagttgctagcccgctcagcgtggagaaatgccagcctgcaacagaggcttgcgctggaaccgaacccctggcgtgagccggtgcgagggggcggtgccgtggctctgctcagggtgcgctgtggtcgccagccgccgggagaggctgggcgggaggtggccttgtggtaaaagcctcatcctagaggggagtgcaagggaaagtgttgggggtgctacaggcagtttctgggctccagattgcgagactagatggcgggactcagagtcaccaccctggggctgaaccaggcaagcgatacaggtttcccctgggctcccagggcagccacagcttttatcttgagattggcatttctttgactggaaaataaagaggcagttcaagagggtccagttgatggggattatggagccattgtgcacttctccggaggccgtttcccttccaaggcggctggcacatcaactccacatatggctcctgagaggggagcctgctgggagcctcctttataactggacaaaaatcaaagcgcagaaattaacggctacaggtgttgccattgttttggtacaaaatgaatcagagaggaaggggagaagtcactgcttggaaaatgtgttgatacaggggcacgttggctcccaggtatattaatatgtgtatagaaagacagcttcccccacccccttctttctctgcaaagcacatcttaccaaatattagccctatgagccagggagaaaaaaaccaggaggtcttttgcaaggcttcttagaacggtcacttgctgctgcttctttgcctgtcaagctgtgtgctgggacacacacattaaggccttcattttgttactggtataatttttaaaaatatgtaaaaacacatatttgcctcctaaatgacttgctgttgccgtacacatataatgtaatatttgattcctgtctttattagatctttataatctaacggtttaagtttggtaaaattatcgtttcctacttctctgttgaaagacttgaaagtacccccgaaatattactttgtgtcaagctttagacacacttagtctctggggttaatgacaagccagctcagaggcccacagcaggtaatgagggtgaaagtccaagctttgccatctgacagctgtgtcgatgtgtggagccaaaacatttctcttgactgcgtctctctacctattgggtcctggaagactcagttcccttccaaacccagccagcatcttgaatgcactcaaaatccacgttttggctcaatcaggtgttcctgcttgtgccgggatggggaggggcagtggcagaggaagtcgcggagcttctgcgagagagctgccccttggaaatcaagcaaaggataaacacatgctgccaaaaatctggaactggaaaaataaataattaaaatgggtccctccacagcatttcttgctgctatttatcaagaactcccagtgtgctcagagctgtgtgttctgaaagacagggtctgtaccccctgagcttgtcagccaagttaaataatatactctggttcaaacaatagcatgtcatggctgcacaggtgggagcttggagctttgcatttttttttcatttaagtaaattccttgctgctagtatgcattgaaaagccttaatggaattgaatttcaagaggagtttgaatgaaaaagggtggtagttttgatgaaaaagctgacaattttctaacctattaaataggtagagaagatactcaattcaacaaatatttgtttgatgcctgctagtgtaagcaatgctctgtgctgggtgccactgattttgccactgaaaggacgatagcagattgcaaccttgtgtaatggggtcatgggatcagtgtgcccctggctgtcactcagaagaatgatgtcatttgattgcatttgttctgcattttattttcaggtcttgaatgtgtttttgaaaaggcatgctgaattataggtgcctaaaacaggagcaggacttgaaacactctagagggaacctcaatagattccaacagcaattcctttagagcagacacagtaattttaacagtaatccacaggctgcaaggcacaagcggctggatttgcttgccttctttctccctctcctcctagctggctcttattttccgtcttcaatcagccataggtagaaaagtgacaggactgactgggttgtattttcccactttctggttctcttatctcttgtcactgatcctcctctccttcagcttctgctaagcagtgatttacgagatgcttgtgtaatgagtgtgtactcagctgtttacacactggaccattactttttctgccttgccaccaactttgaatccactttcataactgtagcaggttaactgcagctctcaaatgtgctaaggcaaccgatttctgtagaccctctctctaataatcttctgtgatatttgtacagcacttccacatgtattatttcttttgagccccgcatcaagtctgaggttgattctatggggatgatttcattttccagatgaggaggctaaagatccgttaagcagcttgctcaagatagttaagtgccaaagccctccaccttaaatccaggtcttccaatgtctacatctctactcttcccaccaccccagggtttctcgaactttcccttgaaggtcccctaattaaattggcagcaaacaacctcccctaggatgtggggttgaggctagagggtaacctcagaaggcagtacatgcctctaatcttggcttgtgttttagaacttcatgtggtctctttcctttttttcattcttttttataacacacctgtgcttggattagtataaaaatgaatgtttttaattatgcacaagttaatcaatttgacttcctacctttctgaactctcactacccctggcacaccaacgtgatacacagaaagtgtttgtgttcgagtttgtggagtctgattgctccagacttgtttggccaccattgttgggttctggggtcactcgtggtttaaacatggcagccacccctcggtagacattgagggtagtacgttttcctgcagtattggtccacaggactctagatcattctagtttgttctctagttcattctaccctttgtagggggacataccgccttcttccacgcctacataattctaaagcctgacataatttaactgtcatgcagacaaccacagaatgctcacatgctgcccaacagagagcaacccaaggaacatgtgtggagaagtgacatcccagttccacttggcgatgcagcctattgacctcaaaatccgcagtcttcttgtgatgtttatttctcttccagcttctgttatgattttgtcaagccattttgcagtctatagactagatggtgattttaccctcatatacacatattatatgcaaaaatggattcaaaaaggacaattgccatgacagcacccacttagaaagaggggaaagcaatcatagctactatctactgaatagttattatggccaggttttgtgtgaagcaatttacatgccttattttctgttgattctcattcaccatatggggcaaggactgtagttatcatgatgattagagatgagaaaattaaggcccagagagcttctgttaggttccatagctggaaaatagcagaggatttagaacctgggtggtccagctctacgacctgagcttttagccaccttacaagtctatattaaggagccctaccctattactattaataatcatgatggtgatgatagtaaagacatccaaagcacacggcattttctatgggtcaagtagtgcttattctatacacattaactcatgaatccagagaatattgctgtcaaggaaatgggattccccacttataaataaagaaaccaaagcacgaagggttaaataattactacatgcaataatgtgtacatgtccactgccatggacagtctgtcagcatggacattaggtcctgatgtcaaccctaacctgtatggagcaagctaagcccttgcaactgctatgctaagaccagctttttgtggacacaggcataggatagcagagaatccttagttatgagctgagtttctaggtttgcattggtgaccacctgaagttctgactctggcaggattgtagtttcttaactgtgaacttctagacagtgttggtgttctgatctatacatcatctcaaagggtgttctctgttgaaccccccatacctagcatagtacccagtatgtagttgggacttcagaaatatttgttgaatgaataaatgaaggatcgtagagaatcatgttggaaatgttttctctactcagcagcaacactttctgggagtctggtcacctcatactcccttaatcattgtctttttcttaatgcctgatgtgtcagggccccttccttccttagttttaggttacatggtgtcctttactccttcacctcttcccaggtacttccattcattggaataccaggcttctggtgttgccaatctgagagttacttttgaccatggaaacctagcatggttggaacttctatggtgtaatttttgattgcctttcaactatgagaggaaagggctttatgctgtaggcagtggtccttaaagtgtggactgtggcccagcagcatgaatatcacctgggaacttgctagaaatgcacattcttggaccctacaccagacttactaaatcagaagctctggaggttggggtgggactggcaatctgtattttagcaagctctcaacgtgatttgaagtcatgcttaggtttaagaaccactattgtaagataaaacaattttccttgtgttccaactgaggcacctaggataggaacttgtcgcattttttttccccttgcattttacttagggccataaaaagtaaccaacacattttaccacctgatattccttattccctcctcactgatcaaaggcagtacctagaaagccctttaaagacttgccatttttgggcttagagtctgagtctcaaaaacctgtaagccatagtttaattagctccttcactcttgcatataacagtttatttgtatttcactcccagatgtggggggatgtctagagtcgtctattgtgctgtacgccagaaccaattccgcacaccagacattctctccaagggtccattctttacaacatcagtcctgttaccaatttctatcctagtcatgtacagttggttgcatggaataaagatctacttgagtaaggtcagataaagggatgagggatattgtggacagaaacacatggaattacatggtaatctaggaataaaagcaatgctgtgttatggttatgtgcacagtcactggaaccaggtcaattgggaccaaagctaccagttaccagttgtgggactgtagacaaattattcaacctttctgtgcctcagtttcttatctataaatagtgatcctcttggtttcataggattattgtctggattcacgagttaataagtatagaatgaatactactaactacttaactcatagtaaatgttatgtctgtgtttactatcatcaccatcattactactaatagtgttaggacgggctccttgatatgcagttggaaggtggttccacattcaaggcagcttaaaggagctcagtcagcatcagcaaatgatggatgctccttccttagtctccctgttaacatgacttagcctggctgctttgcaccatcctcctaccaaataacctcctctgcttcctcaaacatctactccctcccacctgagtatgcctcaggcctgccttgatccccactgtctatctttttttttttttttcttgaaacagggtctcattctgttgcccaggctagagtgcagtggcacaatctcggctcactgcaactacctcctcctggattcaagcgattctcctgcctcagcctcctgagtagctgggaccacaggcgggtgctatcacgcccagctaattggaataaaatcatttcttaaacaatatggttcctggaggagagacactggaaactttctttcttttttttttttttttttaaacagagtctcaccctgtcacctagactggagtgcagtggcatgatcatagcttattgcggcctcaaactcttgggttcaagtgatcctcccacctcagcttcccaagtagctgggactacaggcacacaccaccatgccaggctgattttttttatttttatttttggtaaagatgaggtcttgctatgttgcccatgctggtctcaatctcctgagctaaagcagtccttccgaagtgctaagattataggcataagccagcacacttgcctcccactgtacatcttaacagcctgtcaccttcggctttggctactaactggcaatgactttctgtattatttagtccaagttgccaggagagagatagagttgagtccagttcatctttcccaccagatgatgagcccgagttcagtgtagggatttgtaacccttggggcaggtgctggcccctggtccgactagaagaggatcaaacatgcaattgtccccagcaggtgctgcaggtggattcccttagaacaggatggcggaagagccacaccaagaccaacatcttgattacagtagcatacagtagtgtcaaatctgcctcccttaaagttttttgatgaccactcccttccccaaacatgcattggcacacagatgatgaagactgggaaaccccaaagtcgacttgggaacagtgtgtggccagcatgggtctaacctgttcatcaaagtggggccatggaatggtaggttttcttattatgttttttatgaaatgtgcttatcatttttcttagttttaattttctatcttgatgaaatgctaatttttacatgatcacaaaaacaaatagaactgtgacattcatttttcagtttcagtagctgattttcatgttggttggattgtctgttcaatagctacacatagtgctttccttagagaagttactagggggatgtggccctatttccatcccaccaccctggtcaatgctgttatgcaggggtcagcaaactctttctgtaaagggccagatcatcaatattttcggctttgcaggctgcatacagtctctatcacaactgctcaattctgctgctgtagtgtgaacacagccatggacaatacataaatgagcaggtagggctgtgttccattaaaatgttatggacaccgaaatgtgaattccctgtaattttcacttgtcatgagttattctttttttgattcttttcaaccattttaaaatgcaaaagctattcttagctcatgggccgtttgaaaaacaggcaacaagccagatttggcccacaggtggtggtttgttgactcctgctattatagaaagaatgagagtaaaacaaacctttcccatacagtctgatgctcatggcaagagagacgtgaccaaaagctgccgtggaagtcccaaaaagaggcactactctcagcctgggaggatctgggaggcttcagagaggtaatgcttgagctgcatcttgaagctgagtggagaaggcagagaagggagttctagagagaaggcacagcttgtgcacaagcaggaagttgagtaagcctgggagccacaagcagctcaccaggctgcggaatgtccagaaacgagtgtgcaggtccagatggtgaagggcttaatgagacgggcaaaggtggttggattttatcctgatggttggtcctctagactttccaaaccttgcctttaaaataaattatcaatcggaagctccctatgagaaaaaggttagaaaattatcattaggcagggagcagatggcgcatgcccataatcccagcaccttgggtggccaagacgggtggatcacttgagcccaggagttttaagactagcctgggcaacgtagcaagaccccatctctacaaaaataaaaataaaaatcttagccaggtgtagtggcacatatttgtagtccaactgcttgggagtctgagacagggagatcgcttgagcccgggagttaaaatccagcctgaacaacgtaacacgaccctgtctcttgagaaaaattatcattgacttggttctttttgtaagaccaattaccaagcgctgggaacatgggaggaagcaggggttgggagtttccggagccctacaacttgccacaccccatccgggcctgtccctgaggcatctccaaggaacttctagagcagggtgtgaaaaccatggctaaggttgatggagtaaaacagcgggattataaacagacacaatctgaatgtgttctagaaagattactcagaagataaagtggctgcaataaggttggaggcaaagcaccttattagaaggactatcatttgttcgaatactttcttgagctcctattatgtgccaagcaatgtgtggagacatttatatcatggtaaatagggtagacaataaacatttggcaaattaatagttacttttacattaagatgatagctaaaatttacagctcacctactgtatatcattattctaagcactttaccaatattaactcatctaatcctcactgcaactttacaaaatgggctgtattattactaccattttaaagatgaagaaacggaggcacttcactaaacaggtaatgtagcagaggcatttgggggttgcaggtgttggggtaagttctctttaaggaggccgaattgacaccaggaagataagaaaggccggttgcaggtttcccttgcagatctgggaagagcagtgctggcagactggagggcatgtgcaagaactcaaagatggaacatcctggtcttggtggttgtggagagcaaaatgctagtgtggttgaggctagggaggtagaggagagagtatgaggggaggaggctggagaaggaagcagcaggcccagcctgcaggcctccttggcaatgggaaggagattagattttcttctccgagcacaggagagcctttgaagggaagtgaaatgattggatttgaattcctaaataacggctgccctgtggggaatggatgagagattggccacagcggaagaaggaaaacctgcaggaggctcttgcagtagtccagacaagaaataatgtcaccttggccacgagcagtggtgacaaatatggagagaaacagatggattttgtttattgcaatcattcaactgagggacgttgaagagctgaactgaggttgcagcaatgaggatggagaggaggggtgaagtgaaataggtttttaagacgtggaggaccaattagaggatgagtttaatttttgttgatttttagatgccttgggacatacaggaagacaggaagagttgctaagtagggagttggcaatgaagttaggagttggggatccactctataaaccttagagtgtgccaggccctgtgtcaggccccacacatccctgtttgggctatatgtgcactgaggggagtagccaggtctggctcatctttctttcccaggcatctatcaggttggctaacacatggtgagtgagccctcagtaagtgtttctagaactggaaaaaaggtactcttcatctggtggagaagatagtgattatagcatggtgagatgagtgcgtccaagaggagttgacactggggctctgttttgaggaaaagtaaaagctgggcagcaacagggaagtgtatttccttttgactcccttcccaattagccaggattccttgtcatcccctgtctccccgcaacctgactgaggaagcgtgttacctaacacaccagctgttcctgatcatcgccccttggtcttctcctgaggctcctttctctatcattgaccccttttaaaaattggattccgagtgcaaagccttgcttctctgaggcaatagaggggggaatagcctagagcagctggtggctgtaggtgtaacctagtgtcagcccccgcacttagcaatatgtttcttcataaccctgcagagctcttgtgctgtagacctctaatgcagcctgtagaccccctgacagaataatgttttttaatgcatgaaatgaaaacattggattgcaaaatagatgtaatatattaatatatcgatctatcaaaatgttttttcaattaaaggtatagtaatgtatcttaacacattcaatagcaagatatagaggcagtaactaccataatttcaaagtagagatgagcataaatgatactttgagatatctgcaacaactatcaaataatatgaaaatatctgatttcttttggtgacaaagtcacaggttcagtaaatactgctgtggcctgaatccatgattaaaggaaatgctaagttccagttagagctccctggaataaagatttttttttttcatccagtttcatggattccctgaattctgttcatgaactgtggatatcagtggagccccactctaaccattcatttcagttaccaagtgtttcagaaaccaatgacatgaaatgcaaagtttagcattttatttcaaaactcatttgactggtttattttgacaatagggagtttgttcccatctgtattttacagatcaagtacttggtcaacagcaagtgctccataaataataggtggatgagtggatgggtgggtggatgagtggatgggtgggtagagaaagctcagaaaggataaatgactgtctaaacacttacagctcataagtaatagagtttgaacttgaaaccacatattttttactctaaatcacttgttctttctattcttccatgctaccatcagctacttttatttgaaaggacacaatgatagggcatgttcttaaaaatatgcatttgaatcatgggaaaggacaatcctattattatttgctttggtcagagcacacctaaagtactgtgtttacttcttagaagcacattttaagtacactgaatctgttgactgttcatggactgagatggcgagagacttagaaattgtctcttacaagctatcaatgagctatggatgtgaaattcagagaaggccagtttacatggtaatgggaggtctggggtggttttctattgctccccaaggcagaaccaaggcccagtatttacaagggacgaatcttggctcaattaaagaactcagtaatgattaggcctacttatcaatgtatcataattgcctgatgagatattgactgaaagtattcaaacattgacccatgtatttatttatccctttgataagcatttattgacaacctactccatgccagatgctgaggtggatgctgcattcgaagtgtagaatacaatactattggagatagtcagtcttataaagatggagtctactgggagacagtaagtttttaaaaacaatagttataataagtattttgaaggaaataaatggagtgctgtgattcagaataaaaactgaggtaggaacgggaagagctatggtcatgtgtccacgagtaggtgacattcaacttgaaacctgacagattgaaaagagccagcctacaagggagtgaaggggggtggggctagaagaagtagcaagtgcaaaggccctgaggcagaaagatggtaatgtgtccagagtctgaaagaaagtgactggacttggggagcagaagcagagtgcaggaggagaagaatggcaaggaatgggtgtgaagacgtcatcagggatcagctcagggagagtctggggaggcatatggattcaattctcagcattgtgatgggaagccattggagaattttagtcaagggagtaacaggacctgtttcatgttttaaaagatcactttggctactggacagagaataaattgaaagttaaaagggagacaccaagagactcttgcactagatcgggaggggaatgaatgggcacttgggctgaatagagcctgtagagatagagaaggtgaatttgagattattgggaaattcgactgagatttttaatgtattggatgtggggagtgacagaaagagaagagttgagggtgattagtggtgctgttgaccatgatgggtagcaggaccagagggaagaaaagtctagataaccatttgtcagcacctctgaaaccatgtcacagatttcagtggttcttaacaggggataatgacatttacttaggggatgttgagaaatgttggggagagactttcacagtagtcaacataatagagggcactgctttgtggacaggagtcaggaatgctagaagtcccgcatcacacaggacagctcccataatgaggagccatcccatgtagaatgccagttgtttcctcctggacaagcactggtggactgagtctctttcaattctgagaacctagggccaggtgcggtggctcacacctgtaatgccagcactttgggaagctaaggtgggcggatcatgaggtcaggagttcaagaccagcctagccaacatagtgaaaccccatctctactaaaaatacaataattagccaggcatggtggcaggcacctgtagctactccggaggctgaggcaggagaatcgcttgaacccgggagtcagaggttgccgtgagccgagatcgtgccactacactccagcctgggcgacacagtgagactctgtctcaaaataataataataaaaaaaagaatctaggaaaatgcagtttcacgctatctgccattcatatacttttgtaaattatttgagtcaggtcgtctttttataagtaattgactgaaattagccatagggaggagaaggaggttgtgggggtggggaagggacataaagcgggaagaaggaaggatgaatcttggagagtgggactttgctggtgggttggcctgggtggctgggaacactggggcccgtcgagggaggggagagggtagaaggaggtgaaatacaagcttcaccaccttgcatgcttcccacggctgtgctgcacaccagtgatgttttctggtctagaggctgcccagctgtgtccctaagcacactttgaacctctccttttggtcatttgagtccccagtgtaaattcttccttcagacgatcagagagctgccataacttagtcagatcccggtcaacactgtatacactagaatggagaaaagcaacccgagccttcctagctaataaaatcactgtccgacttgggcaaatagttgtcctttccatctccttagctgaataaaagtaatctaattattttcaaacacatgatttcatctggacctcacaacaacactgagaggcagggcatgtggtattattaggtccattttacagatacagtcactgaggttcaggagacttaacttgctggaatcaagcagtctataaggcacagagcaggggccagaacttgggtgcagggctccttcaggggtttcctaatggcaagtgggccccttgggaagtaacagaaaatgatgaaactgcttcaaaacaaagggatcccaaagggaacagaatataaaattaactgcccaagaaaggcattttgtcatgtacaagaaattgataggtacccagttggtatttcctcccacctggtaaggtaaaatcaacatacaggaatccttttagcaccttgggggtaaaacacttgactcttgcttggtgctcaacattggaggccccagttttgtgcccattccctcccgatgatgccgcaaaagctggagcatggctgtgagcaccctgcctcgatgagccgggccatctttcacatggtaggggcagggccaagctgtggctcagctctagagggtgcctttcacaccctggaatgcatgactggcaccccctgcagttgtgcagggcacaatgggagagtatttattgtccatgaaaaatcatatgaagcagctgcaaagaagtctaattgttttcctcatgatatgcccatgactccctgcacacacacacacacacacacacacacacacacacacacacacacgtacacacacaaacacacacacacctcaggagctttggtcccagtttgctatatcaggcccaaagctctttctctctttcagcccaaacatcgcttgagccaaggtagctttctcctccaactgagaaaagtttccctcttagagccggcaaacgtgtaggcgtgacgttatgcttagacacggcaggaaggagaagcagagtgacaactctgagggaaccaagaaagcccaaaggggagacaaggtttagagcgaaatcaagatcggattttgtcatgaaaggcagaactggcaaaagcatcattacaaggcattaaccttgttacacacagacgaacaagcagaggctgggattcagaaataaattacacataataaactagacagaataggctgagagcaacattagcgattatgccctaaggggagagaagggcaagatagaaaataggcccgaaaaaaagagagaaagaataatctctggacacagggggctgactgcactgtttcccccttcttctgcctggctccctgggtattaacctcacttttgtgaggacgtttctccggagcctgtctttcttttgttttcatttgctgcaataagcataagaaagccattcaaagggttccttttcccattcacagggacctgtccatttctgtgtgtttccagcacaaaagaatccatttccattcagccagagcagcccctagagttttcatgaggtccaagcctcctctcctgttttcttccaggctcgctgttgtaataggctgcaaaatcctgactgtggccagggtcctccaggctggtgagaggaacaagcatttgtccacgtcctggtccctgcagctggggaagaactgcagtttagtgtccgctccaacaagttgtgattgtcatttcttaaacagtgacttccttttggttccaagtagcagaaaacgcaaccaacagtggcttaaaccatgacaactattgttaacttagtaaaatgtttaaaagttgaaggtctgcggctcagtggtgtctccaggaacatagaatctcttttctttcccctgcaccaatcttagcatgttgctttgtatccttcatcttgaatctcatggaaacagaacggttgccacgagtctatgcatgatgagatcacacaactgtattccagaggaggaagtgagggaagagggcaaacgggttctcctcaagaggcttctgttatcaatgaggaaacttattcccagaaatccttccagtggacttctcacatctccctgcccaggactgggccacatgaccaccctcagctctaagggttaggaaagccagtgtctggcaatagggaatggagctgccatttggcttggcccaacgatagcttccaccaggcttgggttcattgctgtctgaacaaaattagggttcttcttggcaaagagaaaataactgccatgggtgtggcagtaacttgtgtttttaaatgaagtaatgatagcaagcatgggttatgtgttgctatgtgccaaacctgttctaagctttactgaggcttacgcacaaactcacccagtcctcataaaaagtctgtggcataaaaagtctgtgctcttatcatcatttccatcatatggaggagaaaactgagtcacagagagattaaatcacatttacaaaattacttagctagaaagtgacagagccaggagtcaaacttaggtggtctggctggctctctatgctatactgccttcattaggtaagatgataaaatacttcaggtagcacacagtaagtattagtacatgttagctggtattattattattattattattattattattattattattattactatcatcatctcttttttgtaaccaccctgccaatcagacacatcagccttattagatactagaaagctaacccctaacagcattaaattaattgcccaggtcacacagtgagtgagaaccaagctcaaatgtaaacgagtgctgggtgttctctcaagtttgagaatgttgatttaatggctgcaccacttacccatgctacttttttttttttaaggtaaggtctcactttgttgtccaggctggagtgcagtggctcaatcatagctcactgtaacctggaactcctggactcaagtgatccacctgtctcagcctcctaaataggtgggacaacaggtgtgtgccacacatctggctgattttttatctctgtagagatgggggtcttgctatgttgcccaggctggtctccaactcttggcctcaagcgatcctctcgcctcagttacctatactactgatcccggacttactttgaaaaaaaaactacaattgttgaggacagccagaaatcagagaaggacaccgggaaaggtgagatggtaatttgggacggatttttccttgttccgttttagcttttgagctgcctctgttttcttggatccagtcttttgcaaacaggatctctcatcccacctcaggaaaggctacccatggttcttggtgaattagaacaggtacagtattaagcacctactgtataccagacctggctgtacactgtcccacctggtccttgtggataatctacagtccacatccattactttttctgtgttgtgagatgaagggaatggagtcctctagccagagatagtggtattagaacattctggatacccaggcagagacgatgccctattctccgcgttagcctctctgcagtgttcaaatatttaataaaaataacaggcatggtcagctgatcttacgtttgaacaattctggatttattttaaagcaagatgtgtggcatggttttacttatttttttaatcctaaaggtcatccgacttttctttttctgctcatagtcatgaggcttccttatctaaacagtgatctattgttccaaccttagacccacagagaatttttttccttaacttcaattttcacaggacagctcctcatcttcccatattgcatgaaaagtatctttcaacaagggaaaaagaaactctaatgagctttccctaaatcttcttaaaccgagttcactatagaatattttatgcaaaaacattgccttctcttaggttatgacatcttttccttgaaaagtgatcagggcattggacaaatcctggctagcttatcttgtccttgcagcgcaacctcaacaaagaaatatagatggcactttaaaggcttcagaaatcaatttagtcccataatccatttagtttagatgttaatgaaacttggtgggtttaaaaataatgaatatttaataagacataaattgaaagacataaacactgttggcgataatataatgaagttaataagtcttagcctccccctccccaaatagggcgattttaggagttgctgtgttgcttactgaagtttgctggctgcaacttcaatgtgcctttaaaaaccttagtacagttgggaactgagctctggcagataaagtgtgctatcacactgtgttcagtagctgcagacggcaacggctcttcctagctccatatcttccagagatttgtgtaacaaactcagtttcctgtcgttgaaggcaggatgcagcacgaagcacttcattccttttaaacaaaaaagaaaaagacattttggtcgacactctctctgctctgggtttaaagaggggctttatttaatgatcaggaccaagcgtgtgattacatgtgctcagagcctcagacaatttaaatgccttcaggttgggagttagactttttgttttcccctttaaaagcatcagcaccagggccagcccttcaacttggttcctccttagctctgtggctcgatcctacccatcgtccacaactgtatctttaccttttcaccccctcaactagctaccctgtctttaggcttcctgtggtcccttttggtaaatctagaatccctcctttctgccatcacacccaacaggatcgtccgtgtcacatcttgggaaatgtttgtgtttaacctcacagaagccaacgcctagctaaaatgaattggcggcaggattttgaaaacagccaagtataagatagtctgcctcccaattcagcggtgggctgtctcttggcactaaagtggaattcagcttcttatatcagctgaggggtgttagatagatggccagctcgctttggcactcaatacctgttcatacatagtaaacaggggttttctttggttgggcaggtatggtgattttgcaaggtaatgaaaggttgctcccggggaatctagtctaagagaatatatgtggggcccagaagtgagatcctgcctaggagggcatgagtgacatttcatcagtataatgagaactattgttgttaaaaattattattatttttttgtgcgtttgtgtgcatgttcagaaagaaggggatcaacctgaaagagtccaaccaatcgcatcatctaccttgatccattccgacctgacatccgtttatggcaccgtggtaatgaacaggactgttttattcttggggactggagatggccagttacttaaggttggttttctgtgccttcttcaaatgtctattttaatggtgatattttgtactttaaaaaaacatttttttaatgcttctgggttatacatgagaccaaaccaagaacttcatgaactccttaaagacccccagaaatggcctggaagaaaatctggaattctgtatgtaagaatgccccgtagccatgtaatgaagtatcagctaccttgctgcccaggagtgcaccaagatgtttttccttccttactcataagccagctgggtgaggtaaatggaggtctggtccctaccccaaccctgactcaccttcccaagacatgtaaccttttagttctagctcctttatcatggaaatgtacaaagcacctgatttctcacaacttgaaagagatgagagattatagggcttgaaaagaagaaaaaacaggtgttctttccctccagcccacttaccacccacagagggggtttgttttttgccctttgtacccacacacaccacagagaggttagagatctaaaatcctttgagactcctcttgacttttatctcagaggactatttcttctccactgtgtggacacaccccggtcaagtgcaggtttttattcacttaggagaggggaagaggggaggaggagaaaataaaatcagagataccaaatgacttgtctgaagttatctagcgttcatcttatcaatgtcatcagcaagcatttattgaagaccttctgtggtctccaacaacattcctggtcaggaactgcaccatttctatgactaaagactgagattccttggcttctctgcagccatccatttactctcagctcagatttttaatcgagtaatggtagatctgtttccctcaactgatctcccacagataactcgctgtgtgactttaggtgaattgcttaacctctctgagccttcatttccttaccagtaaaatacagttctactagacaacccagaaaaacgctttcctcttctgaaagtctctaattctgtcttctgcacacgtattccccaccatccccatccccaagccaaacctatttacttgctcctgtttgatcctgtttccaaatatgatcctgtttccacacttgctcacactgtacctccagcctgaaatgcttttttcttttttctcttatttacggcaccttatgtgtctatgctgtggctcagctcaaaccccacctcctctttgatgacatctaggcctggagtgaccttgctctcctctcatttcctgaaatactcatgatctatgtcattcttgtggctcattccaaatgtcttgcctggagacctcaccttttcactggtgtctgtcttgccttcccaacttgattttaagcctcatgagaagggggccatgaattcccacagcctaatacagtgctgagtgcctggtaggcatttgatttaatctgttttctttggaggaaacccagtaacatatgggagggagtttgtttgtatacacattcttttaaaatatacattgatcatctttcctgttgtgttagctttatttcctggggaagggtaaatacccatccatcattctacacaagtcactgggtgacgtctgtagctccaccaacctggtcaggcttattggacccatttgcctggcgggagtttccatcaagcctttctgggcctcctcaccaattatctcttcagatttgggatgtttttgatgagtgttttgacaagaacactgtttccccaaagccgagccaaccaaaccgctacatggtgaattggaggtgaaggaacactcgtctataaatagttccccatgggatggcctggttttgcctgtcctgtgtgttcacccagcagcctgcatgccgctggccagcttttagcgatgttgtggcaaccagggagtggaccaagctgcagcttcatgctgctgaggaggccgcagccgaccgaagtctcgctctcctcaggatctgtatggggtacccattcagaagccacctgtgtggcctcgttgtttttttcaaggtttgaataacaaaggcagctttttgttgtttgttttgtgactgctaacatttacacagtgcttcctagatgccaagggactctatatcttctaccgaattcagtcctctccatgacacaatggggcaggcctactattcccattttacagatgagggaatcgaggcccagagaaatgggatgattgttgttcaaggtcacacaggggcagagcagggatttgaacctggaatgacttcagagactgcactaagatcccctatgctgcactgactttgcaacctctgccgcacacattggtactactctctgaggattccgggggcacatgggagacatgcagatagggttccatgccgtggctggggacacatgctcctggggtgagtcagccttcctagaggctcaggaaagagtcccagcttgagaataaggcggaccatctgactgaggaaatacctcactggcgtggtaacttcttgggaattaacacccaccccccaagcccccaataagagagaagttctctcactcaggagaagggtgtgagggatgaacttgagctgacttgccccaccaggctccctagggcagctcagtaatgcccaagcctctcccctgtatcctgtgtacagattcttggatgtagcccctgaatttacccagaatcctgaagacccaggatcgtgtggatgatttggaaactaccgataatcctcaaatccctttattcagaagctttcagcttctcccttgccaaggcttgtcaccagaactgttagaaaggatgaacactgatagacacaagcttggctccttaagccacagcgtgggggaactaatgagcggcaaaaaacaaaactcaacccaacgcagacagtaggaggaggagaagaaagagggcttggatcagccacagcctgactcatcagtttctgagtgatcatgagttgacggcattttgacatgtgccaggcactgttgtgtataccttgttgaatgagagtcaggaaacagcaattggggcccaactgctgttttttaccaccaccagtaaaaacctgacttcttaaatctctgcaaatcctgtgagttttaatataatttggtgcaattttaagcctcatgttatttaaataatttttccttattgtaaaggtaatatatgctcatgtaaaaagttgcagagtcgtcgggggtgagaggacaacaaagaaaaaattacccctaatcatgtcatgcagaagcaactgctgtcagcattttggattctctatttatgtagttgaggtcaggttttgcatccttttcttcagttagtgagggaaaatgcttacattaaaatgttattgcaaaccctttgtaaaaagtatttttaaataactatatcatattctattatttgggtacattattttgaacttaagctaagatactggatcacttttaaagtatctttaaagacatgcattttccaaggaagacggcattacctccaaaggtaagatttcactgataatctgtgaagaaactaaaggctacagtatgccagtacctttactgtcctccttctcttgcctatagacctaagtccctttataagattttggggaaatagaaggaatttagagctcaaagggtcctttgagagcatctaatctgctcttttattttatcggtgtaccgtcccatggtcgtgaggtgagttatgtctagtcacccccgcagttatttccccatcctgcttcttttcggaacatgattgcatgccgggtttttttcagtcgtcagcatctccactgagatcagctgaaaagtatggtcacactgaactcagctttggggaattcacactgcacgtgttgcacaatgtatgcatttctgtaaacacacaccgagtctttctccagattatagtacagcctatcatgtggtttggattcctttgagctgactctgttgcccatagaaaattgtccttatttcaaaggcagaattgcatattttgagcttttccaggtggtaaagtaagtaataacagaatatgcatgaaatttgaaatttgtaactttatgcatgcccattaaccttcgtgtaagcataaaagataagaaggcaatgggcaaggaagaataatcgctaacatttctgagctcttcctgtgtgctgggcattagaaccagcatctgcacgggttaactggtttaatccttaccagtcaatactctcaccatccccactttataaatgaaaaaacctgaggcctcgagaggttaggtatctttttcaaggtgctctgaaccaaaataatctgtcccagagcccgagcttctatcccccaactaaactgcattaactcttacagagcttagtagagtttgagagctggtttttgttatatttctttctaatactggggtataagggttgataccaagatgcagatgtttgaggtttcataagaaggggccgagaaccctgtggtttagtttgttcctatttggggatggcttcctggcaacccagctgagtgcagagcccgctcctctctgagctgcgcgtagtccacgggggtctctgaatctcctttggggccccagctttaccccagtgggctcctttgtaggaaaggtaggaattctgtattcaagttgctgttttgaatggtgtcagcagtaaagactagtgtctccccgacctcccagggactgcagtagggttcaggatacaggaagctatatcacatagctctatcctgtccccatatccagtcttgaggtatttcctatgtgcttgggctcagactggttacctatgtggccctctactcccacttaatggctttcttttgtttatttttttttcttttttgagccaaggtctggctctgttgcccaggctggagtgcagtggtgcagtctcggctcactacaacctctgtctcccaggcttaagcgatcctcccacctcagcctcttgagtagctgggactacagacctgtgcccccacacctggctaatttttttgtatggacagggttttgccatgttgcccaggctggtctcaaactcctaggctcaagagatcctcccacctcggccttccaaagagctgggattacaggcatgagccactgcacacggcgccactcagggatttcgtttattcaaatcacagcaaaattaaaccggttccaaaaagttctgtctgaattcaaacagaagcaaaaactctgtactgcctaaagagtctgccttgactctggttattgaagtttttgaatgaatgtcagagaaaaaaatcttttgtaaaggcaagctgtactatatacccagaagatgttcaaataaggaataggagaacttggggaacctagaacaggacctgggaccggaagtggtggtggtggtggggatgactgagctaacagaccaaaaagttaaaacaggaggaagtgtcaaaacttggaagtgggttcattggttggctgtttaggatgtcatgtgaagcctgcttcaagttctccccacctcattaattgcaatttatgagtttgcagggactccccagtttgaaacttttagtcccatataatccacaaatctagaacctgtggttcagactgtatgcttctcttactacctacactgcaataagtagattggaaacaaaagagaaatttgccttgatctttatatttcatctttgttactcctaactactgaggcacattaaatacttaccttgctttctcctgtgtgtgcatgtgtgtgtgtgtgcacgcatgcacaggcatgcacgtgtgtgtatatgtatgcaggcatgcacgtgcatatgtgtgtgtgagcttgtgtgtgtgtatgtgtggtttaagtctccttcccagcatttctcagaaactgcttatggaaaaaaataataataaatgaaagggttggcttgtttgcccttcaactggttagccccacagagtgaggcataggaaattaaatttggcataaaatattatagctttttgaacacccgtggcttttccatctcatggtaatcgtaaagaaaaaaaaatagttttttgtttaatttttctcccccctcattttcctcaccatgatatccttcctgtgggtgatcttgaacctgtcttacaattgtatggtgttgaaatctccactcagttaatttcagcagtgtagttgggagttttatatgcaacaaaaatcccaaggctcgttaatagtctaccatgaggcttcaggaagacatcaacagaaacaatatgttgacacgaactgaaattctccatcagagaaaatttgttttctacacaggcttcagctggaaaaagctgaagagccctataaaatcttgaatgctaatagcgtcgtttttcatttaataaatatctactgggcaccttgtatgtgccaggcactgttctgggtgctgaatatacaaaggtgaacaaaacagacaatgcccttgctctgctggtgggaagaaaaagacagaaaacaagtaaatggattaatcagcgataaagacacttcagatagtgctatgaagaaaatacagtgatgggtagagagtgacagaggtgttcagcggagaagtgatcagggaaggcttctcagaggaggtgatgttggagacttgaaagataaaggagtatacaagcatacacatggagaaggttcagattgacttcagattagatctatattaaggtcgtatcctggaagataaaaatccacatcgtgcccaaggattgtgtgtgtgaattggatgagatttctcttatgcaaaattcaacccgttttgggtttttgtgactcattgttacttcctgcattgcttcactgatcatgttctttttccgaggctgcccacctaaactgagctgaggaaggaacgtttcccttgctccagtcttgctggcttttgtctgtgtgttgatattctcctgaagtttgcaattagaaagtccaagtgttccattagtgcctgtgggctggggctcgggctaggtgagagatgatatgaacactgacctgtcctttagtcatctgagagagatgagactccaggggccacggaagcagaaatccctcacccctctgtgtagcacatttgggacctttgtggtgaaaactaaaacttcctcttgtcctgtcctcaggattatggagagcattgtttgcataatctagcaaaaagaaaaacaatttgactcactcaccctcaaggatttttaaatttaaatgttatatatttatttttaaggtaatacaatgatattgtttaaaactcaaaagaaccaagaaaatattccgtgaaaggcacctggtcttgacttccaaggcaaccaatgatagtagtttcatgggtatctttccagagatagtttatatctgtctacaggcaaaagagtgaagatattcttcctcccttttgttgaaacataaaacacagtaaacatatatgttatatatgtaaaaatacctgtatatgtaaatatgtctatatttatagatatatgtacatatttcatataactttaaatataacacaaagagctttctaattatttttatagctaaatagtatttccttgtttgtactatagtttacttaaccagttccctattgctggagatttaagttgttttaatcttttctttataacatacaatgctacaatgaatatatgtcatttcatatatatgtgtgtgtgtgtgtgtgtgtgtgtatatatatatgtgtatatatatatgtgtgtgtgtatatatgtgtgtgtgtgtatatatatgtgtgtgtgtgtatatatatatgtatatatatatatacgtatatatatgtatatatatatacgtatatatatatgtgtgtgtatatatatacatatatatatatatatatatatgtatatatatatgaggggctgcagggtccaagggtatgtcctttgtaattttgatagatgatgccaaattaccttctagagaggtctggcttccaccactgaggaaacatactaatttaaacccagcatctatggctatcaggacaagcttcagtgcaagccacgctaagtagctttttcaggaaactgattggtaaatcctgggccacagaactttttgataacttgtaaaaaaagaaagaaagaaaaacaaagaaagaaagagagagagagggagaaagaaagaaagagagagaaagaaaaagaaagagagagaggtaaggaaggaaaggaaaggagaaaggaagggagaggagaggagaggagaaaggaaaggaaaagcttccttgccacaattcagagttctagagagaatattgatgcttcatttccaaggtaccaagtaaataaatcaatgttgcacccaactagatcttgctgaccatctgtatcaatgatgctccaagagtaaataaaataagcccccaataaaaactgcagtgcagctcctaatttacgtaaaatggatgagtggtggtgtaaagtatgtttttactttgttattttaaagcaaaccccacagacatgatgtcgtttcacctcaacatatttcgttatgcatctctcaaaacctacagttgttttcttaaataatagtaaccataatgccatgatcacagctaataaaattatcagtcattctttaggatcacttactatccagtctgtgtaactaagtattcccaattgattcaaaaaggtattttaaatggttttgttcaaattggtatctgcacaaagtcctcaaaccaaatttggttgttctattatctagagcagtctcctcccttacttttattccctgccactgacttaactgaaaaaaccaggtattttgccctatagaatgtctcttatcatgtgtttggctttttgcttccttgtggtgtcatttagcttgttcctctactcctgcttcctagtgctaaatggaagttagtgctaaagacttgactagattcagtttcaactttattggcaagaatacattatgggtggtgctgcccaatgatgcttttgccatgatgaattcctgaagagataccagggcagcagcttctcttctcttgacccttccttgataatatttctatcagtgtttgtttaaaaaaaacaaaaactggcttcctgtttctctttccctatacaactgctttccagaaccagatcaactgaatctgagctgattaatacagctaatgaattagagacggcaaatcctggcaagcccataccttggtcagtgcctgtcccttggctccacttacaggattctgtagagcagtgttggccaagagaactttctgtagtgatagaaatgttctacatctgtactctccagtatggtagccagtcaccttaggtagctagtgaacacttgaaatgttgctagtgtttttaattaaatgtaaatttttaattaaatttaaatagccattatgtggctagcggctgtcatatttgatagtgcagctataaagtcgttttaaaatgacttgagacacacacctttcccacctcccttaggacctaactgcttctgttttaaaaagagcttttaagaagtcatatttcatatgtttggttagtgagattgacttttacaaagctgctgctgaatttgatgagcagtccaagggcttcaagtgagccactatttgcaccaaatccacctgggcttggcccaagcagatgatggaaggaagtcactgatcgcagggcaaagctagactcgggcccaggtcctggaaaggagaagtgaatgcgggaagttgctctgtgcaaaattgataagaagcctttggctaaacagcaaatccctaactgccatcaggatatgtgggaacaggcatattattgattagtagatgtgtgaagtagactttgtccaaaaagaatctcaggtgccaaatttttcttttgaaaccatgcgcccaatgtggctgatgtctacagtggtagagatatgaatacagataatctatctggatgtgttcaaactgacaaaatgttgaacaccttcacttttcaaagtagtgggtacaaattgtgttaggtacaaagaagattaaaggttaggtacaaaggtgattaagacatggtcccaggccaggcacggtggctcacgcctgtaatcccaccactttgggaggcagaggcgagcggatcacctcaggtcaggagttcaagaccagcctggccaacatggtgaaaccccgtctctactaaaaatacaaaaattagctgggtgtggtggcgcatgtctgtagtcccagctattcaggaggctgaggcaagagaatggcttgaacctgggaagcagaggttgcagtgagccaagatcgcaccactgcactccagtctgggcgactgagtaagactccatctcaaaaaaaaaaaaaaaaaaaaatgacatggtccctgcgcaaaaggagcttgcaatctagtaacagattattatctattgactattgattatgtgctaagcatctttcatagttcttatttgatccttacaaaactgtaataaggaaggcactattagccccattttagagatgaggaaattgaggcctagggagattaagttaccagttcaaagtagtgcagctacttaaaggatggaggcaggatgcaaactcaagcttaagccaccattatacttctctagcactataggattcgagtctcccgatggctcttcatacccacacttcaaaccctgccttcttaccatctcctcttgctccttgacccaaagccctgccatggcctcctctctctcatctacagtaaaaggcaggctgtttacacaggcccacaagacccttgattatcattcccctgttatcttactatcttactgttcactcctctacctctctccactgaagccaccctggcctcctcccattttagtttctttgcactgacagggctgcttttaagaacatgtttcattcaagtatgaaaataactcatctcctgcaagtctaaataaatatcaccttttcagtgacacctaccctgaacatatattctcttaacccctgaccccactatattttataatttacttttttcttattaatagtctgctgttactcaccccaccatacacacacaggaatgtaagttctatgaggtcaggagctctcccttccccattttgttcactgccatttttcaaacacccagaacagtgctgggtacataatgggtgttgggtagatgtttgttgactgaagatggatgaagctcaggtgtgtccaatttcaaaaccactgagtactgagtcacacttgcgtatattttatatgtgaacacaaacctacttgtctgtatctgccaagttaatctgggtcacttctaactgtatgatgatcagagtatcctgtgcaaatacatgtgggagctacttcctttaatttccagtctctcttgagacagcactaatgaagctgtcacttgtggcttcctatagggccagacatggtcagaaattgtggtcagccagcttccacatatgaggatactaccccagccctgaagagcggctttttttgtttgttcatttttggtaactttgcctttacaaaagaagaaatattatgcttgttattaccagccttgttgaggactgagatgtgggaggatgattaaggagcatggtaccttaggcagtatttgtagtgagtgaaaaaggatgtagctttatgattaagctacaatttttgccaccctgctattcaaagtgttgaatagaggccggaagtggtggctcacacctgttaccccagcactttgggaggctgaggcgggtggatcacgaggtcaggagatcaaaaccatcctggccaacgtagtgaaaccccatctctactaaaaaaaattagctgggtgtggtgcatctatagtcccagctacttgggaggctgaggcagtggaattgcttgaacctgggaggcggaggttgcagtgagccaagatcatgccaatgcattccagcctggcgacagagcgagattccgtctcaaaaaaaaaaaaaagtattaaatagaaatcatgtttctctttttgaaaaaaaaaaataggttattcttggtgagaatttgacttcaaattgtccagaggttatctatgaaattaaagaagagacacctgttttctacaaactcgttcctgatcctgtgaagaatatctacatttatctaacagctgggaaagaggtaggtagaaatactagttattgcttctgatttatgaataaaaatggtttaattgatgtcattatctagtagcaaagcttttactttgaactacagagtttaagcagtgccccaggctttgaggagacccgcagtggttcacaggcacggaattaaaaaccttactgactgtcagtaagtaagcaagaaatattatctatttagacaattttattattggctatatttccagtgccaagtttttcagaggagggtgtgcttggaaatgggcgcataatcagcaaggtaactgaatttacacatttattgtgtgggcactgaacggttagatgcatttatgaatatacccaatgggactggctttggaatttggggttaatatcaggccacagtctcatacacattcatgaaccaggaaatatatggtactccccctccccctcttcatttatcttgctgttttggcttttcttttgcttctgcttactgaaataaaagtaatatatttttatattttcttcatctttaccaagtgctgtcaccaagggaaggggaaaagaaactaattgttaatgagtctctactatgcattagtcactattctttgcatgatctctgtctaggtgcatagaattgtgtacatatacatacacacaagtgtagaaaacagtgttaatgaaatgtgttactgaccgggcatagtggctcatgcctgtcaccccagcactttgggaggctgaggcaggaggatcacttgaggccaggagtttaaggctgcagtgagccatgatcaaaccactgtaccctagcctgggtgatggagcaagaccctgtctcaaaaaaaaaaaaaaaaaaaaaaaaaaggctgggcatggtggctcacacctataatcctagcactctgggaagccaaggcagggatcacctgagttcagacgttcaagaccagcctgggcaacatgatgaaaccccatctccactaaaaatacaaacaattagctgggcgtggtggtgcatgcctgtaatcccagctacttgggaggctgaagaacaagaatcgcttgaaaccaggaggtggagtttgcagtgagctgacatcacaccactgcaccccagcctgggcaacagagtgagactctgtctcaaaaaagaaaaaaaaaagaaagaagaagaaaaagaaatgtgttattaatttaataaaaataaatgtgttattaatttattttatgtgaagaatctaagacttggagaggttaaataacttgttcaagaatatctgtatctatctatctatctatctatctatctatctatctatctatctatcatctatctatctatctataggttagcctttgcagggctgtgacaaaaactcaaccctgattctaaagcctctgataaatgatattaaatccaaaatttgtgaaaactggacattccctggctcagtggttttgacctatgaccgtttgaacatggaaagtgcaaagaagataattgagacttacataattatataatggatgtaacagatactctcagcccaaccctggttttccattcttttcctttcagtcattctaaggaaaatagcaatgacagcaatctacatgtgctttttgagtcacagataagatgtgcaagcaatttgtagtttctggtattcttataaagacgatactgttctttgcacattgaaaagtcagttatatcaaaatgaccacactgagatggccacatcttcccacagagcttgtaaaccagtccttcaccatatagaatctcctatgccaatttgcttcaccatgcagacactttgtattatgtttcttccctggggatcccatctttgaaagacttttgtctacccaacaaactgcacatattaagtaacagttcccattcccagggtttatttatcaagggcgtctcaaaactgccggtcagagtactgactgtgttcccacatggagctgataaaattccaacccaaagcaaagaaacttgatatcttccttaatccatgcgtgtttttccattcagctgtctgaaatattgcaaatagctcataagcccccattacttccttcatggatagtaatggaaccccagaactcaggaccccaggctgggaaccattatgaaaagccaccagtagttgatgggttcccactttctagaaagcaaaaagttctagcctctgatcattcaaagcctgaagtcctgggaagagtttttgactgggcatcaaagctggttagccctgcattcttcactgaggattactgctagagatcctactgtttgaactctggctgagcaaatataacgcctaaagagacaaagtccaaggaaggctcttggggagataagaacagccaaactaataagctatgggatatccataaaatggtatgatacggggccgctaaaaataatcatatggagatgtaggcattgatatggaatagtcactacggtctgttattaaattagagggcaggtctaatgtagtatttttagtgtcctctctctctctctcttttttttttttatggagtcttgctctgtcacccagcctggagtgcagtggcgcaatctcagctcactgcaacctccgcctccacaggttcaagcagttctcctgtctcagcctccctagtagctgggactacagtcacacgctaccatgcccggctaatttttgtatttttttttttttaatagagacggggtttcaccatactggtcaggctggtctcaaactcctgacctcaggtgatccacccacctcagcctcccaaagtgctgggattataggcgtgagccacctcgcctggccctctctcatttttttttgaaacagagtctcactgtcgcccaggctggagtgcagtggtgtgatcttggctcactgcaacctccacctcctgagttcaagagattctcctgcctcagcctcctgactagctgggattacagacgcccaccactatgcccagctaaattttgtatttttagtagagacagagttggccagactggtctccaactccaggcctgaagtgatctgtccacctcagcctcccaaagtgctgggattacaggtgtgagccaccacggccagccagtgtcctccctcttatacagagttatatttgtgtgtttaaatagactgagtaatagttctcagagaatgttctggagacccatattccacagaatgctctgagcaaaagtggtcccagaaccagctgttacttactatacccctcctggaatactgtgaggctcagcatagtcaaaggctccgagaagccctgtgctaaggaaacccgttttgctttttcagtctgaggttttatgtttgctggatcatggagcccttttcttgcataatagcagtaaccaatacttattgaacatttagtacctgtcagacaatagttcataataaccccatgaagtcgtgatccattttacagatgaggaaacaaggttagagagattgcatgacacttattaaaatccatcagtgttacagaggcatttgtgaactacaaggaaatacctctattctggttaattccggctcaggatcacgggctgccagctgcatctgtcagcagtgttggggactatgaaatggaagggcgtggttatcctccatgaagtcaacttggaactgaaggatccagctcaggatagtccttgttttcctcacaaaatagagaaaaatagagaggtcccttctagaactccttatttctctaacctgctaaagaagttatttatactatctagcatgtacaacttcctggcataatgagttccacaagttcccttactacctgctgtgtggttttgcctgcagaaagtgctctgtgtgatgctcagttactccctgcctctcaccgccctacttgcaggctctgactggctgcctagatgtctgggtctgcccagctggggtgccctctttgtgggctgctgtttcctgacaatggcaagaggcagctctagggatggggaaatgatttgactactccccctgtttcttttattttcaactccactggaggggtgtgagcaaaacaagccaggagctgaggtgacggcgctgcccctggcaggggtgtgggagggcctcgtccctggtcctcctcgtttccacattgagtgccaaactcctgctgacactcctggggcagagcctttgttattccctaatactcatttccaaaatgccattggccacatatggactgtctctgtatgaaaaccaggcaacctgattccatgatccgtatggaaatcatcattagcagatcggaaacccaactgggtgtcagactcacctgagagagagctcttaaaatacagattcctggccagacacagtggtgcacgcctgcaacctcagcacttttgggaggagtgctttgagcccagaagttcaaaaccagcctgggcaacgtagtgagaccctgtgtctttaagaaaaaaatcttttaaatgaaaaaatacaacttcctaggctctgcccccagacttagcgagagtctctgcggcagaggcctgggaatacgcactgtcaaaagctccccaggtgattgtgatacaatgacttcatgtcctagatcttgagacccactgcccagtgccagtatggaggtgttgagttcaagttgataaataggctctttttggcccttcattagataaggtgttgtagttttcctgctgttgcttataattccatctgaaccattgtcctctttccttttaggtgaggagaattcgtgttgcaaactgcaataaacataaatcctgttcggagtgtttaacagccacagaccctcactgcggttggtgccattcgctacaaaggtatctcctgaattctttctcaccaactcgcatttttgaaaaagtgtcatgcggcagaacacttgttgccctactttaacgatccattccagtgacctgagggaactgatctcttcctcgactaaaatcttgttgtgcaatcctaatgaattctcgaaggtgtttccagcggcgtccgtgctatgcaatcactggacccgggagctccccagtctcggggcgggaggggcaggtgtgcagccttcaggagaacgggagagagcaggcaggtttggcttttactttctccagagttcgccaagactcaagagagaggcaaaagggccccccctccgagaagataaaagaatagagatgtctgaaaatttttcagctgaatccccatcatgtatgtcatgtattctgttcgctccgcagaagcctcgttattgatggcgccgtctcctaatgcgccgcgcagctgtgggcctgatgtacaatctcagtctccgggcagaatctgcccagcctggtctggaatgacgatgctcacgacccatctaggctcaggggcgactcggagcggcttccccgccatggcagtttcctagcgtcgctgggcccggcctggttggattcgccgtcgccatggcaacccagtactggggctcttgctggagaagcaaaggaggagagagccttcgctgcagctcaggcaggaaagagagagagagagagagaaaaaaaaacccataacagtgtctgtcagtttggtgctttcagtttttaaaggtgaaaaggataagaaagagcagagcaggtggagagatgctgaaggctgaaccaggggacagtttgggtttagaaaagagcaggaggaagagaattggtgactgaagggggagacagccaagagaaatgaagggagagggggaaatgcaatacaagcaagaggtttaggaaacaaatcaaaaatacggggatggaattaattaagagttcacgggggaaggcgcaatccgagctgcagcaagaggaataattgcccctgccatttgctacgcttccttaccgggctgtttccgtcagagtcactggcagacaaacgaagcaagggccagaaaaatgctcatgaataattcactgatcacgaacgggatttgtttgttgcacactcagtgagcagtcttgccataatcttttagatccattcatttatgtagcatccctgtctgtatttgtagagctgtgtacaggagtcaattcgataatggtggcgatgatggtggtgattaaatagccacatggagctagcggctaacgtattaacaagctcagctctggagcttttgggagatctccaagctggtgatatgaatttgggagttggtagtattttagatggtacttagagaagccttaagaccagacgaaggagtgagtgttgattgaggagagaagtttgagaactgggccttgaggggctgtggtgtttaggggttggggagaaggaggggaaacagaacaagaaataaggagggagcagtcagaaggggaagaggaaaaactggagagggtggtctcctggaagccaaggaaagaaaggaggaggaagtgatccactgggtcagattcagctgagaggtcaagcaggagaagaaaagaatggatcctttgcacttagcaggtgacaatgggtgactgctgggaatgccatggttaggagtggcgctaaatccacaagagacaatgggaaaataagaccttaagaagggacagcttagagaagctttactgagaaaggcagctgaaaaaaatgaagcagacactgaaagcgaaagtagagtccaaagaattttgtctttttgtcctttttttttttttttttgagatggactctggctttgtctcccaggctggggtgcagtggcatgatcttggctcactgcaacctccacctcccaggttcaagccgattctcctgccgcagcctcccgagtagctgggattaccggtacgtgccaccatgcccgactaatttttgtatttttagtagagatggggtttcaccatgttggccaggttggtctcgaactcctgacctcaggtgatccgcctgcctcagcctcccaaattgccaggattacagccgtgagccaccacgcccagccagttttgtctttttaagatgcatgaaataacagtgcatgtctgcactgttgggaaaattccagaagagaaggagaaatggatgatacaggagagagaagggttgtggagtgttcagtctttcagcaggtggaagaaaatatgacttggtgtgccagtagggaggccagcctcagacaggagcactggcccctcaccctcagtggtaggagggaaggtagggactctgggcccaagcatggggaggtggcagaggcctgtgtggtgtcttctcctattgctcacattattttcagtggcctacggccattgagaatgaggtgagggaggaagcactggaggtttgaggagaaaagagagagaaggagtggactggaagactaggagggagaatagaatagggaaatatcgagcggttgccaggaagcattagggcccacttgaggttgatggtcctgtgtttgaagtgagagctgtaagcatggttttgtctttctcaagctgcgttcagctttggtggtatagctgtagactcagaaaaagttagctttagccagtttgggggctttgccggaaaatacatcaagaaaggagagagtggccagggagctgagggagcatgtaaggaatggatgatgatatcgatatggatgttgattcatataatgatggcacttgggctctaaggagggaaataaggacctgataggggtagggatgtgaaaaggtggcagggtctgtgttggaagttcaagttgagtttaaagattgttaggggcaggcgcggtgactcacacctatattcccagctttttgggaggccaaagtgggtggatcacttgagcccaagagtttgagaccagcctgggcaacatggcaaagaccccatctctacaaaaaatatgaacattagctgagtgtggtggtatgtgcttctggtcccagctactcgggaggttaaggtgggaggcttgcttgagtcccagaggtagaagttgcagtgagctgagatcacacctctactttccagcttggatgacaaagtgagaccctgtctcaaaaaaaaaaaaaattgttggaactagagaattggaaaggggaattattggactgtgggggcttgatattgaggtcatggagggatggagttattggcaatgacagggtctgccatatgattgtcaagatcattggcagagaggtgtcaaggaactgaggtggttaccagagtactaaatggctccatcatctgtgtggaaatcgcagtcaccaagagagtgaggagctacatattcaaggaacgaagggaagtggccagggctggggtggtctgtaatgatcacaatgaggagggacctggggtggtttgagctgacagcatgggctttgaagctggggaggaagtgttggaaagagagaagaaggatcttccagaagaggctgcaagacacaaataggacagctagatgagggagaggaagcagccaggccttgagaggggcctggggaagctgtggcctcgaaggagagctggtttcagtaatattgagaaggggaaaggaacaatcagagaagaggttgaagacatgggggcttctgttgataactggctgtgagttatagtcttttgtttgttttgagacagggtctcatcctgtcacccaggctggagtgcagtggtgcaattacagctcactaaagcctagacctccccaggctcaggtgatccttccactgcagtctcccaagtagtggggaccacaggtgtgcaccaccatgcccaggttttttttgtattttgtagagacggggtttcaccatgttgcccaggctggtcttgaactcctgggctcaagcaatcctccttcctgggcctcccaaagtgttagaattagagacgtgggccaccacacctggccaaaagcctgcttctgctcttgctccctcacccctatcccagtgcgctccaagaagagtgattcatttaaaatccaaatcagattatgtcactccccagcttaataccctcccctggctttccatcttagaactcagtctgactcccttgctgccagggcctgcataccaggctttccgtgatctggcctttcaccacttctctgacctctcatgccattctctcctttgtttacttaaccccagacatcctgatttaagactatgctaagcatgttcctgccccagggcctttgcatgtgctgtttcctcagtctagtacattcttccccacatctttctatggcagactctttcttgacggtctggtcctagagcacacatctctctgcacctgcctacccagtcttcagtagcctccccttactcacagtgacattactgttttattttcttcatggcccatcactattaggaatgaccttacttctctacctctctttattgaaatgtgctcagaaaaacataagttaaatgaatgagataggctgagtgattggtcgactctgccaatagcaggttaagacttgtgccttaaatcttataagacattctgaagtcatggagcgatggcccttcacagccatgtcagaaaccacttggtttcagacagcctgggttctggcctacaatgaaatgaaactaagtctcatatctgtgactcatatgaagctcccagtaccattcaaaattaggaattctaaagggggatgttttcttataatggtagagcatcccactgtgtttattttaaatgtcatggatttatttagaaaaataatttattttctctgttgagaaggttgagttttcttgcatacatgtctagaaagtggaatggtggggagaggcaagaaaactatcttcacttccttttgatcagatgttaagaataggcatccagactgggcatggtggctcacgcctgtaatcccagcactttgggaggctgaggtaggtggatcacctgagatcaagagttcaacaccagcctggccaacatggtgaaaccctgtctctactaaaaatacaaaaattagccaggtgtggtggtgcatgcctgtaatcccagcaacacgggaggctgaggcagtagaatcacttgaacccaggagacggaggttgcagtgagccaagatccagcctgggtgacagagtgaaactccatctcaaaaaaaaaaagggaataggcatctagtataagtagataaaaagcaattagataaacaatgagctctaaaaagtctagtattttattgttggaacctcagatccaacctgtgctgaatttgtctgtgtgggtggaaagtgaatttttgcaggctgaatatcttgggtttggaagcagtttctcagtttctcccatattgcaaagcatagcacatgtgttcagttatggatttccacaaaactggcaatcccgaaccaatgaatgggtgaggttccaaaagttcatttgcaagtttgtttggcatgcagaatgcattttcccatagaaacaatgtcataaattaaggattgattcccaagccagcccataaaatccaaaattatttaatttcaacaaatatttattgaacacctagtgagagcctaatctggggcatgagatagctaggtagtattgagagaaatcggatgccattcttggctttaaggaactcgcatgctagctgggaaggcagacttatcaatggccaacattcattcattcaatcctacatccaatcacaaatattttttaagcacaacaatgtgctaagtcctatgctcagtgctcaggatacagttctttcttgtctctatagagcttgcaatctaatgggggatataatgtgtatcagttaggtttctgatctagtaatgctgtataacaaacaacccccaaatccttagtggtctaaaagagcaaacatttatttacatttgtttttcatgctcatgggtcagcctgtcagctatgggaagaagggtggggtcaatgtcaagctgaaggttgagttcaggtctgtttcccatgtttctcattctgtacatgctcttcttaaggcacatagaagtagcatgagagaccaagctaaactagacaacatgttctaagccctggctgacatcatgctgactaatattccattgataaagcaagctgcatggccaagcccaatatccatggagtagggaaatatattccacctactctagtggaagattctgcaaagtgacctggcaaaaatgtagtgtgggtgtgtcattctagtacaggatggattgaagaattgggagcaataatccactcttatcaataagtaaaggagataaatgaatagagtgtcataagagctagcatgggggaagtttagggtttcatgggggcacataaaattatctaacccaaacttaacaggtcaaggaaggcttcctggaggaagggatatctaatctgaacctgaagggtagggggatatcagctaggtaaagatgaggcaggggaagctggtgtagggaccaggctgtacaaaggccaggagagcttggcctgaagctcagtgtggacgagcttcacattaaagaatttgaattttgttggaaggaccttggggagccattgcagggctttaattaaaagtgcgaccagatcaggtgagtgttttagaacgagaactctggggtgcaaggtggaccggaggggactgagaagagctggcagatcagttagcaggtggctgtaaaccagtaagagaccagggactgaattagaatgatagtagtggtgagggaaggaagtgggtggattagagagctatttagaagatagaattgacagggcttagtgattaattagattcccctttgagtctgacacactaaaaatagggccataaaatgaaaaataaaatctcaaggtggccactgtttttctggaagatgtatcctttctcctttgatctcagtcttcatgaagaaaacaaacaagtgatacccacatgtacacttgattcttcctgtgtcccaggcactgggctaggcaccaggttagaccccaaaagatgggcacctgagtcaaatgtgggagggcttctgagagacaccagcgctgagtctcagagtgtgcagtggggtgagttattgcattgaagctggtgttgagattacagcggaaggagtgcaggcatctggctggggtgaccagatggacagaggtgtcggttactgagtagggagtgtagaaggagtggcctgtttgggctgcatgggaaacgcggggggtggacttccacactggcaacatgggcaggacagcctatgaggacagaggaaaggtcctgtgtttgtctgtttttgcactgctataatgaaatacctgagactgggtaatttataaagaaaagaggttagttggctcatggttctgctggctgtacaggaagcacgatactggcatctgctcagcttctggggaggcctcaggaaacttacaatcatggcagaaggtgaagggaaagcagggcacgtcttacatggctggaacaggaggaaaggggggttggggaggtgccacacacttttaaacaaccagatctcaagagaactcaccatcacgaaaacagcactgaggaaatggtgctaaaccattcatgaaggacccacccccatgatccaatcacctttcaccaggccccacctccaacactgaggattacaattgaacatgagatttgggtggagacacagatccaaacgatatcaggtcccaaatgcattttgctttggatagaatctgggctttgtgtgacctgccagtttcttatctctgccacttctcctcttctataaagtggcatttataattggccaggtattgcaaaaaagtgctgggattacaggcacataatcctgggattacaggcactttgggaggccgagttgggtgaatcacttgagcccaggagttcaagaccagcctgggcaacatggtgaaaccctgtctctacaaaaaatacaaaaattagctgggtgtggtggcgcatgcctgtggtcccagctactctggaggctgaggtggaaggatcatttgaacataggaggttgaggcttcagtgagccgtgattgtaccactgcactccagccttggtgacagaacgagaccttgtctcaataataatagtaatagtacctgcctcagaggtttgctgagagaattaaattccataacgtacatcattgtaggcccagtgcctggctcctggtaggcaacgaagttgtgtcaactgtcatttggtggaagcccaaggaggcagtcattacttgtccctgaggttgggaaaggcttcaacgaggaggtggccttaaaattggccttgaagcctgggtagaccttcaccaggggaagagtggtcgggaggcatttcaggcagaagaatcagcgcagtgagaggtctgtggagagactggcagatggagttctatgcactggctgtagaaggaaggaagtgggtggagatgctgggtgggctctcagggtggaccttactagcgggtgctgggaactcatgacagggttttaagcagaggccttccagcgccatatttgtgttttaaaaagattatcccactggcagtgtggaagatgaaccacgttaatccaagtctctcccggcctcccaccccacccttcctgggtcactttcctctggtgtgttttgtaaagagagagtttatgtcacatctcgtcctgagtcagttacttggtggctattctccgaattcatgtacctccccactgggagaggtagtacgtctcccagtgcatccatggggccccacttgctctggttttagtgccatgatggaatcagggctgggtcctcttcagaaaatgggccctacaggaaagagcacacttgcattcaccctcccaacacttcgtgctccaccctgcactgggtacacacaggtggaggcaaggcccccaggcatgctgcttataaggtatctgtatgcgtccttcaattatctgtacaaatttcacattcactccatatttttctacatgtttcttccatgttgacagttggaagaccttcaagcagcccctggtggctgtttttaggtcttcagctgcagttaggctgttccacgcatgagatcgtgaaagagatcatttctcgctcggtctaacagcagggccctgtggtcagtcttcctatcagactttctgaagggttgggaataacagaagggtatttttaacacatgagagaaaactgccatctgaatgctaaacatatttgtccccaacaccccagagtaacaaatgaaaagaattacatgagttgcttgtggacacgtcccagctcctttttttatcttgctctcctgtcttgagggttcttctccaagtgacactccttcctcaagccccccaggcctatcattaacctgctgggatccttcccaccaggactgtgattgccctgaaacttgaccagtataatccatggtgcacagtaatttatggccatattcttcagtagcctgagttagtctgttctgtcatcatgagaggtgagctacatacagcagagagggcccgatagggcttagatgttttgtctcctccaaatctcgtgttgaaatgtgacctccagtactggaggtgggcctgctgggaggggtcgggtcatgggaacggatccctcatgaatggcttggtgctgtccttggcaatagtgagcgagttctcactctgagttcacaggagatctggttgtttaagagagtgtggcacctgccccctcacagtcttgctcccaccctagccgtgtgacacacctgttctcccttcgcttccagcatgattggaagcttcctgagcccctcaccaggagcagacactacccatgcttcctgtacagcctgtaaaatcatgagccaattaaaccccttttctttataaattatccagtctcaggtatttcttcatagctatgcaaaaaatggactaacacagggtcacagaaggctttgcagtagaaaagtccagatggatgtgactgttcctcattcagaaggcggctgcagtgccccttccacagggagcctgcctcgagtccaggcctggccaggagacagtgtgcatgggtagagaagaatatgcttatcatacattagacactaccttgcacgttctgtgccatgttccatttagtcctcctggtaccccatgaagaaagcactattacaatccccacttcttagagaacagccttagcttatgtatagtttcccacagctgcagaaacaaattcccacaaacttggcagcttaaaacaacatgcacttgtgatcttacagttctggaggtcacaagcctgcagtgggtttcactgggctgaaaccaaagcattgacagggctgtgctccttctggaggcccttctttgccttttccagcttttggaagcagccagcattccttggctcatggtcccttcctgcatcttcaaaaccaacagtgtggcatcatcagattacattgggcccacccagataatccaaaataatctgcccattttaagatcctccacttactcacatctgcagagtcccctttgccatgtcctatggtttgaatgtatcccccaaagttcatgtattggacacttaatccccagtgcaacagttttgagaggtggaacctttcggacgtgattaggtcatgaggactctgtcctcatgaatggattaatgacattatcacaggagtgggttagttattgcaggagtgggttacttatcacaggagtaggttcctgataaaatgatacattaggcccctttctctctctctctctctctctctgtctctctctccctcgtgctttcttgcccttccaccatggaatgatgcagcaagaaggccctcaccagatgcaggccccttgaccctggactgcccagtctctagaactgtaaaaaataaatttattttctttataaatttcccagttagtagtattctgtaatagcaacacaaaatggactgagacaccatgtaaggtgacacagtcacacattccagggattaggacctggacatctttgggggccattattctgcctactactggttgtacaagtaatggattcaactctgggcttagctctagctcctaagccattagagcaaaacaaagagacacaggcaagggacattatccctcatggcagtgggtggagaggggagagcctggagcaaatggccctaatggagcatttgtgataactgctatgtataagaaagacacggcactcagggcccacctgagtcagagaaaaccctccatcttgaaagcttaggcaaccatgcattcatttaacaggtatttactgagtacctgatatgtgtcagtcactgtcctaagcactgggattctaagcactagcagtgagtaacacaggtcaaaatccctccacacgtatgttcattgcagcactattcacattagcaaagacatggaatcaacccaaatgcccatccatgatagactggataaagaaaatgtggtacatatgtgccatggaatgaaaaggaatgagcagccatgaaaaggaatgagatcatgtccttttggggatgtggatggagctggaagccattatcctcagcaaactaacgcaggaacagaaaaccaaataccgcatgttctcacttataggtgggaggtgaacaatgagaacacatggacacagggaggggacaacacacataggctcagctaatgcaagctgagcttaatacctagttgatgagttgataggtgcagcaaaccaccctggcacacatttgcctatgtaacaaacctacacatcctgcacatgtaccctggaacttaaaatgaaaataaaaattgaaaaaaaaatccctgccctcatggagttccctctagtgaggtgttttagtttcccaaggctgccataacaaattactaccaacacaaatttatcgtctcccagttctggaggccagaagtctgaaatcaaggtgtcagcagagccgggctccctctggaggctataggggcaaatccttcctcacctctcccagctccgggtgactcctggtgtttcttggcttggggtaggataaccatctctgccttggtcttcacatgaccttcttctgtgtgtccaaatctccctctcctttctcctagaaaattcccattcactgggacaccctaaatccaggatgatttcatctcgacgtccttaactctttacatctacaaagaccctatttctacataaggtcacgttctgaggttctgatgggcacgaatttgggggaacactctttaacgcacaacatgagggaagatggacagtgtgaaaataaatgaggaaagagagaacatgtcacagagtaaacagggctgtgaaggaaaataaagcagaaaaaggaaatggggagcgctagttggaggcagggggcgctaaatttaaacgggagccctggaaggcctcagtgagaaggggcatctgagccaagacccaaagggacccactcagttttggggctatccgccttcatgggctattgcactattgagtggaatggccgacaatttgagacagaagagccttcctcctttccttccaatccgggatgtgtccttgtgcagatctcaagcttgacgtctgtgcggtgacacttctttatggtccagtgaggctctaatgacagcaataatgataatggaattggggatggcccctccttctcgtgtgaggaccccattgtgccgactaattgtgtagaagcaagtaggacaactgtctgtggggtggaagcggtggggagcaaagaggaatatgtcctttgggcctcagggaattactgaattaccgttgtgtgggctgagtccatgcatctgggttactgtgaatgctggaagggatttggggggctttccaacaccagaaggggtctgggggtcaacctgtgtcctgtgggttctctacctcctttttcagctgtgagaggagctatgagttctatgtatttcaaagcagaaggcaaaggggatagcagtgctaaggggcacctctccacccttggtgtcccagacagttggcactgggaaagtgctcgccatgctcagaagccaggcttttttgtttgtttgtttgtttggttggttggtttttttagatggagtctcattctgttgtcaggctggagtgcaatggcacaatctcggctcactgcaacctccacctcccaggtccaaatgattcttctgcctcagcctcctgagaagctgggactgactacaggcgcgtgccaccatgctcgcctaatttttgtatttttagtagagatggggtttcaccatgttggccagtatggtctctatctcttgacctcgtgatccccctaccttggcctcccaaactgctgggattacaggcgtgagccaccatgcccagccaggtttgttttttgtttagtggagctagtaactgacgttctcggacctcagcctccgtgctacttacctgcaccatctctaatggatgctctctgacttccaacaagcaccattaagaacatcccttttagtaaatatatgttgtaatggaatagatttttttgaaatgaccttatctcaggcagcatgcactttcataagaatgtattgattggcctttaaatattcctcaaatgttttcacttgtctctgtgacctaatatttgtcctgttcccagcatctcctccatatccaaacacaatgttcaggtcttcattcgaagccttcctgccagtcttttgttttttgctttttaaacattttgatgcttttattctgctatatggagggtgcactgtttctgataggccaaatgtgggatttgatattgctttcaggaggatcgggttttaatatcattgccacctgtttagtggtggagaaactgaggcccacagaggctaaggaatgtggcccccagttacacagggagtatatgggagagcagctttgaacccagacccttctgactcaagaggtgtcattttcccatttttatttccatgctgctgtttttttaaatggctcccctaaattatttagttcatggtttgcatttggaaataaacaccaacttttagtacactcattgcccacaaaagaaccacatggagcaaaggccacaaacccattttgtgtgagtgtttcagtctgcaaatgtgttttttatgtgctaaatagctcaaagtttcaagacaaaggctgtttttccaccacgccagtgaacaggccaacctagtgaacaaaaatcaatgaaatgacttctgctggtatcactgaaacacagacaagaatttagccattttaaaatttccttgttaatccaattcagctaccttttgttgaatcccagccatgggccaagtcctgtactaggccctgggggaaacaaagatgaatgagggtctactctgatgaagttcacaggtgagtgtgggaataatttcaatacactgtgtaaaatgctctaatagctggtactcaaggtatgaaaggactccaaagaaccctttaatatttaggaggaaacagagctgtgattaagaatcccccaagaagcctcgaattgtgtctgcctccttacatagaaaaggcatgttgggcattgagctggtgtgtgagcaatgccaaagggcatctggtcaacctcattgcccaaatccctttctcatcactaccattttgtctttggcttatgtcatccatttttttgcctaaattttctgttccattttcccatataatataataataataatgaatatttattgaggcataattgtaaactcttagaacagatgtacatttttctcccaacttcatcaggtgaaaactattatttgcatttctgcagatggagagcctgaaacacagagagggcacatgtcttgcttgaggtcaccagcttgcaaatggcacaaccactatcctccttccttcactaagttctagccaagctggtctatttcatcagttccttgcagagaccatgctttaagtgcactcagatactttgcacatgctgttccttctgcctggactgctcttcccactacttttttttttttttttttttttttttttttttttttttgagacagagtcttgctctgtcacccaggctggagtgcagtggcatgatctcgactcactgcaggctctgcctccagttcaagcaattctcgtgcctcagcttcccgagtagctgggattacaggaatgcaccacctcgcccagctaattttttgtatttttattagagacagggtttcaccaggttggccaggatggtcttgagctcctggcctcaagtgatctggcctcccaaagtgctgggattacaggcataagccactagcactggcctcttcctactactcttgacccgactacatggttctcacccttgaatgcttagctgaaatgccatctttcttcactagcctgtctaaagtgggttcctttctactatatctttggtttctgcagaagacgtacctcaatttgaaattattttaaatgattgtctgtttatttggtttttgtctatgtgcttctctggactgtaagctcaataagagaaggaacttaactggcttatccatggaagtgtctgcagttcctagtggagtgtttggcatctgatgggctctcagttaatatttgtagaatgaatgccaggtatggtcttaggccctgagggtgcaaaggtgaataaggtgggcctttccctttgggggatttacagtgtagctggagagacaggcaggcaatcagcaactaatgcagtatgctgtgtagagtaggagcatgtgtaaatgtcatggagacacagaggagggagtgactgctttgcctggagtctgagcaaacatcatagaggaagacactgaaatagcccttgaacaaggaatgtgatttcaccaagtgttgcaggcccaggcacgttcagggcagtgaggatggcacacgctcgggagggcctggcctgtttgccctgtatgtgtttatcaaatgcctgctctccacgaggcactatggaatagataccagggatgggtgtttttaggagcttgcagtctagagagatagactcatcaaccaaacttacctggggatgagtttgaagaggaaggcaggggccagatcacagtgttggggtcagagatgggcatggaaacatgtattgcagactgaggtgctgaaaggcatgtagacaggagagtctggtatgggagaaagggtgtcatgagagatttttaagcagggagtaacatcatcagctctgtgcgtaagagtaacccagatgttgatgtggaggttgatgagaggaacaggaagtgggaagcgggagacctcatttggctgctgcaggaacccaggtgagaggtggggggtaagcatgggttgtagaggatgcttagaattcgtttgggtacaagagttacccaaactagccaaagtaggcacaaagttttgtaatttgatccgccgtgaggattattgctcattaaaccagaccaggtagtggttcccaacatgtgtgactagaatttctcatccctcagaacatccttcaacaaaaaagctggaagatggtacatcattcattcttgtctcagaaagttacaaagcacagtggcatctacaaggctctgagaagtcctgcagcagagagacttgtttaattttatttaactagtgtttcccaagcttcttggcaatagaaccctactttaatattaacaccaaaacaaatccaggaacacagtttgaaaaatgctgagaaattgagtaaaacttgtattttcctatatgttcatgtcttggaagaatctacttgctattatgctggcatttgtgatgtcgctgccctggaagccttcaaaatttttgagcaattaggtgtagtagtaagagatagatgccagtgccagacaccatgctaactaacctctctgcacctccgtttctcaacctctgacatggaggtggtaacaataacacctacttcatgggctggttgtgaggattactgtgttaattcccagaagtccccagaaacagtgcctggcctatgggcactaggaaggtgcgatggtttgaaaatgtcacctaaaaagcgtgtgttgggaatttaatccccaatgcaactctgttgaaaggtgggacctagtgagaggtgtttaggtcatgagggctctgcctttgtgaatggattaatgccaatcatagaagggcttcaggctgcaaattcagtctctttctcttgttcacatgcgcatgccctcgctctctcttgctcttccacctcctgccatgggatgattcagcaataaggccctcgccagatgcaggcccctcgaccttggactctccagcctccagaactgtaaaaaataaatttcttgtctttataaattacccagtctgtggtattctattatagcaacacaaaacagactaagacagatgggctcagtcactattagctattctgagaggcaatataggtagctgatgagaccacaggctttgaggctacactgcctgacttagtaggtcagctcctctgcttactatccctgtgaccttaggaaagcaatatggaaccagctatgcctcagtttcccacatctgtgaagcagggacaattattgcagctacttagaggtttgttgtgaataataaatgaatcaaatcatgtgaaaagacatcgcctggcatgttagatgtttttgcttaaaaaaaatcttttaattgtctctgttattagcataattttatcatgtagactgactttcagcttcagtgatgaagatccaatttttgagctttcccagcaagttattttggtcttatgttttggcattcccctcttaaagagtctggaggcctttcatttgaagtttagtttgtcacagacttcctattctcgtccattcagtagactttggtttcctcatctcatggactggcaattgtaaagaaagtcccccgattctggagaccacctcgcccctccactgggctctgtgccttccctaaaaatgcagacatctgtttcaaatcacttagcaaaagaccttgggttgctcttatagcaaagccctcccccagcatggatgcagtctcttgtttcctgggagagagagaagctggattgtttccttgttaaaagttttctgatattatatcagtgtagaatctttggaacagttcacactaacccccacattcaagccacttacctgatatgtagttatcagattccttcagggactgtctgctcttggtgaacaattagattagaggatgctgatgaaatttgagtggcaggaagtagaagttacatttctgagttcagagtttctatttcaaggttgagtaagtggtaaatttttactgcaagattctagcctaacagagttggcttctcaaggtcccccagcccggcccatgggtatttcacctgcttggaaacttcagctccttttcagaggtgggcctccctgttctttatgttggcatgaaaacaattaataatttaagccatgcccattaaaaaaatagaaatgctgtataaatacaatactgtaataataaatttaaaagtcgatccagctgggcgctgttcccacactaccagctgagcagaaacacaaataagtaaagaagaaaactgctatataatgcaaatggctgcaatctcattgttttctgctattgtttattgcaaatatatagtagtaaagttacattatggataagtaggttttgtgggctaacctggaaacctaatcactgtttataacattatttctatgggggaaaaatgcattttatattagaaacagatggtttgcaagaaaacctttttgggagtagaatggatttctaagtccagggccgcctgaaattttaacctcttgctagttgtgtggttgtgttgtattcacagctagtgatagaggaaaattagaggcctctcagaatgcccacttctgtgttctcccccaaatccttgctaaccgcttcatcctacagtctctgccttaccttctgtcttctctgtttctggggtccccatccctgtgtcctcatcctggcccagctccaccctgcaaccactggttgaggtcccaggaagccaggaggaactatgaatgtcctctattaagtggtggttaggatctataggaaggcatgaagccagggggccaagtttgtgggctctgaaatcagacttctgccacttggcagctatgtggccttgatatgttactgtacttctctgagcttctgtttcatccgtaaagagtgaggttgttgtgagaactaactgcaaacactcccatcagtgcctggcacacagtaatgtttcctccatgccagtctgtggtggggtaattattcagggatattatgggttacacatatttctatgaacccaggaagcaaacccactgtatataaagactttctaagttttcaaacagtgaacttagaaacaagtgtctgggaccttcctgtttatgacttggggccggagtaggtttggaactttttttttttttaaatctgttgggggtgagggagggggcggttacatacttatatagttgaatgccaatatcaaactctagtattatctcgaatacattaagctctacagcagattttatagcaaactaacaagaacagctttcttaaatagtttcattgactgaattgtttctacatacagtgtttttcacataagggaagtctttttaaattaactttttggtttgggggatttttttttttttccttcaggcaatcttttctttgcatttgggcaggttctgtattctaatttgcaaataggcttgtgtctgcctgcaggctttatcatgaaagtattagctctaagtggaaataaggactagaaaaataaaatactgactgggagtctgaggactttgggatagatcctcagtagaggatggagcaaaagtaatagtaagtcaagaaagcaaatatatctctaccagtttccctagaatatgtccattcttatccaaatccaattttcctcctattcttggcctgaagaaattgaaatgaagccattaagatatcagcctatctgagagtgcatcactgaagaatcagcctcactaagagtcctgtgtgacaatgagattttaatttaattagggcagtggctcaagtgtttatgcacttgaccgttgctcttgttgatacgcaggaattagagtgatagctttcaaaaggaattatttcagagtaactagctttgtttactaaaatatgggagctataagatctgctctgtaagaaatgtaaatgtatgagtaatatgctgtcatgaagattttataatctgcagtatttgagaagtaataagatactgttgttggctggccatctggttatacatacttggtgtcatggtttgctttttattttttcattttttatttgtactggtgagaggcaaagaataggagttcagaggtggtgggttgtttttttatatatatataaaaacaaggaatttatgtttagttgcttaacatggttagattttgtttttgccttatgcagaataaaaaatgaaaggttcattttatactttcttttccctttttttttcaaaaagtaaaatggaaacctcacccccaatttgtccccagatttaaactttttgcttgttttaaaaatagtctctttggcatgaggaggagtcagacatgaattaaaactctagaaagaaaaatcagcaacagaaaagacctatagagatttcatatttcatcctttcattcaaaaatatttattgaaaccctagtatttgcatatcatgctgccagacactgagggatttgctaaagaaatattaaagaccttctcccttctttgaggagcttagagcttacttggggagaactgagatagacttatgaaatagttaagttgtaattcgaggcagcatatgattaaataccgaaatatgtacttctgacaagaaatgctataggagttcagaaaagggagtgataactcagtggcactactgttttctgcctacaaattggcaaattgtagcactatttgtatgaaatattttacacttgtttttttggcagccttaggctttgactcccaggcagcattaagagccaacaaaaatatttgtactccagtctcttcggaattggcttatttttttttttcttataggcagaggaagtgccttacacaaaccggagtgcccatgagaggcagggagtttttgacagtcatgatctatttcagatacaaccgaaagaaccagcttcgtcattctgtttttcaatccagcagtgcttgtctctccgttgcaaactctctctgacattgacaggcggtttaatttgaacttaatgtctttgacggatgagctagccatcaagggtcagataaatttatggctttggagaattgccgatgaaaatccccatggttataatgttggagaagaaactgacacagatgtagtgggaggtggaacacagatgtgcttattgggagcagggttccccaaatgtcagaagccggtgacatgctaaaggtattgtgcttggggatgacgtttagtgaaactcactgacttcctgttctatttttgccatattcaaattaacacagagctcaaagatgaagccatgaggcctaaattcttaagaattgaaagagagagagagtagagaaaggagaaaaaataaaacctttaggaagccaaatacactgtttgggcccatccattcctcattccgctcggatcccctccgggactccccgtagctgaatgtggtcatcatttggttgcttttcaatctcatgattcatgtgttttcagtttcttttaaaaattcaccatcactggtttaccacccctgcattttaatcttcagccttgaggaggtgtagtactagaaatatttcgttctttccttgatgctattcaatggaatatctgtggagtccaacaccctttggcgataacgtgctgttggtatttgttcttcttgccaggttggtgccccgtctggtgaggcaagggttcccaagttagtgtgacctagagtgactgacacatcaagcaagccagtgatctcaccactcagcttctgagcatctctttatcaaagtagttggccctggccacagcttaagacttatctgggtcagcctctgagctggctgacttgggaaaatggccctggaaaaatgtttcacctatatcttttgatataatttggtatctgtctaaataaatggtatgtagcagatggttatggaatgtcttatcaaattcttaggcagactctgcccttgaaatttttctatttaattatcatactgcaaagcacaaaatagtaactttgttattatttttaaacaaaatcaagttacacaataggttgatattctgagaatgaatagcaaacctaaaatttatacaatatgtgaactcttccttgagctgttctttgctaggcatttctaaaagggagctccctatttcagaatccatgggaggatgtgtttcagatatatttggcgatgtcatcttgagagatggctcaggagtcgaagttcaccatgttgtctacatttgttctttgctcctagacatgatggaaaaaaatgctctgctgttttcttgttgcttttcatggttttagcatcatgttcctattctcgctcaaatcaataatccactgtacaaggtctggcattttgtactgaagccaagtataagaaagttttaactaatgcacgtatggggtcgctgttttaactaacacacgtatggggtcgctgttttgttgcctcgtttttttaggtgcacttttcaaggagattgtgtacattcagagaacttagaaaactggctggatatttcgtctggagcaaaaaagtgccctaaaattcagataattcgaagcagtaaagaaaaggtaagaggaaagattttaatttgtcctcgttgtattgtctcattttgcacagcggatgctaaatttcttctgtgtgtaaaatatccattagcaatcaaacatgcttagtgatagcactccattcatttagcactcattaacgaatattgagtgcccaccagatgccatccactctgcaaggtgctggggatacagcggtaaccaagtcacatcatgggcctgctctcatggagtttgtcgtcttgtggagctgaagatgaccctcaatggttgaactggaagaaaagttggacttctaatgttgtagaaatacatattgcttttgaaaataaagaaaaaagaggttcagattcatggtcaacgagataccttaaaggtggcttaattgcagaattttgtttagtgtaatggtcccttatcctaatgtgttgaggcttccccagtaaccatcttatgaacatagcttccaacagtcttggtagcgatggagagaagaccaacatgggcagtgaccattgcaagtgaggtcctttggaaagccagtggacccttgctatggcagcaccactcttgacaacacatcagtcctgtcattggatgagagaagggagcaaggagcatatttaagcattttcaaatgcacacgccaaccgtgccctacggaaaaagggaattcctgccttgcagtctcagtggtgctataaggaggcattttctccctaatgacggctcttgtgttatgaataattgtacagagtcctctgttatgaataactgtacagcagccagctgacctgtctgttgagctcactgtgttctgtttgaatgccatattaacaaggaaatgggccactttctcttttcccttacactttgccatttcagagaaatagcaagaactttaccacttacgatgatttaacatttaataaaggagagccaaagtatttaatgagtgataaataataaaataatcaagcttctaagttgtaactgatcagaacgaacagatttaaagttatttggctgttgtcactttctgttgtcttcctggagaaaaaaaataataataataactttcatacaaacttctaccagtcctgaatcagagtgaatagatttggtggaaaagattcttaggcatctaaacataggtatatccaaattctaatttctctcatcagtctgaaaaatagccaaatttggcgctaatagagaatagtagaaagtagaataccataatccttgaatatacccaggactctgataagtggttaaaattctggaagattttttttcttatgttatttataaaaatttaaggataatacttcagctaaatgtagtgggaggaagtagcttgttcattaaattaaaagtgctgcttatacaacttccgtacctagctaggggctcactattacaaattaatcactgtttatatctggtctggtacatttcaaaactgcttaccacccaaacgaccactggtgttttcttcctcgccctaagtcccactgtggtttaccctaatcttcccagagacttcccacacagccactgcctcactctctccagctcaccaccactctcaaagaagataagaagttcgtaatttgactaaagctatcctttgaaaccaacttcggactaattattttaatagtgttgataagccatctgattctatctcttgatcacattatttcaaaatatttcctaccctattgccacctttggcttacctgaaaatctcaggtctttgtttaaataaacctgaccctgacctatggagacggcagtctagggttgtgttcagttccacctattagctctattcaaaggctatttgctacctgcctatcatatgcctagtaacattctagtcactttgtaggcagagaaaaacctccatataataagaacctctgttcacagaagctttatttctttccacaaaacaattaaaagatagtacatcctcatactcactatgggatcagcattaaaaagaaataatcagagcaattccagttgtcctggagggatttctgtgaggttttgttgagtaaaaacagcaagatgcataaaagtgttcctagcatgatcttatattgatcaaaaaatgcccctgtatatgtttatgtatatatgtctctatatgattatttgagcatgggcaaaaatatagaagaattcaaacaaggttgtaaacatgggctcccctggtggaatgactgatgtggtggagaaggaaagcagagatatgtaataaaaatagaaaagacggccgggcgcggtggctcacgcctgtaatcccagcacgttgggaggccgaggcgggcggatcacgaggtcaggagatcgagaccaccccggctaaaacggtgaaaccccgtctctactaaaaatacaaaaaattagccgggcgtggtggcgggcgcctgtagtcccagctacttgggaggctgaggcaggagaatggcgtgaacccgggaggcggagcttgcagtgagccgagatcccgccactgctctccagcctgggcgacagagcgagactccgtctcaaaaaaaaaaaaaaaaaaaaaaaaatagaaaagacacagaaataaaattattattgttattatttattatactttaagttctagggtacatgtgcacaacgtgcagttttgttacataggtatacatgtgccatgttggtttgctgcacccatcagctcgtcatttacattaggtatttctcctaatgttatccctcccccagccccccaccccccggcaggccccggtgtgtgatgttccccgccctgtgaccaagtgatctcattgttcagttcccacctgtgagtgagaacatgtggtgtttggttttctgtctttgtgatagtttgctgagaatgatggtttccagtttcatccatgtccctgcaaaggacatgaactcatcttttttatggctgcatagtattccatggtgtataggtgccacattttcttttcttttcttttctttttttttttttttgagatggagtctcgctctgtcgcccaggctggagtgcagtggcacgatcttggctcactgcaagctccgcctcccaggttcatgccattctcctgcctcagcctcccaagtagctgggactacaggcgcccaccactacacccggctaattttttgtatttttagtagagatggggtttcaccgtgttggccaagatggtctcaatctcctgacctcgtgatctgcccgccttggcctcccaaagtgctgggattacaggcgtgagccaccgtgcccggcctacgtgccacatttccttaatccagtctatcatggatggacatttgggttggttccaagtctttgctatggtgaatagtgctgcaatatacttacatgtgcatgtgtctttatagtagcatgatttataatcctttgggtatatatccagtaatgggatttgctgggtcaaatgatatttctagttctagatccttgagggattgccacactgtcttccacaatggttgaactagtttacactcccaccaacagtgtaaaagtgttcctgtttctccacatcctcttcagcatctgttttttcctgactttttaatgatcgccattctaactggtgtgagatggtatctcattgtggttttgatttgcatttctttaatgaccagtgatgatgagcatttttgcttatgtctgttggctgcataaatgtcttcttttgagaagtgcctgttcatatcctttgcctactttttgatggggtcgtttgctttttcttgtaaatgtgtttgagttctttgtagattctggatattagccctttgtcagctgggtagattgcaaaaattttctcccgttctgtaggttgcctgttcactctgatggtagtttcttttgccgtgcagaagctctttagtttaattagatcccatttgtctgttttggcttttgttgccattgcttttggtgttttagacatgaagtctttgcccatgcctatgtcctgaatggtattgcctaggttttcttctagggtttttatggttttaggtctaacatttaagtctttaatccatcttgaattaattttttgtatcaggtgtaaggaagggatccagtttccgctttctacattttttttttttttttgagatggagtcttgctctgtcacccaggctggagtgcagtggcacgttctaggctcactgcaacctccacctcccaggttcaagcgattctcctgcctcagcctcccaaatagctaggattacaggcacatgccaccacgcccggctaattggaataaaagtattccttaaacaatatggttcctagaggagagacactagaaactttttttttttttttgacagggtctccctctgtcatctaggctggagtgcagagacgtgatcataatttactgcagcctcgaacccctgggctcaaaggatcctcccacctcagcctcccaagtagctgggactacaggtgtgaaccaccacacccagctaatttttaaaaattttttatagagataaggtctccctatgttgcccaggctggtctcaaacccctgggctcaagtgatcctcccacctcagcctctcaaagtgctggcattataggcataagtgaccatgcccatcctagaaacattcttttacaaatcagaactaaaacaaggaattccaccatcgctaatactgttgacattatttgtaaagccctgtccactgcagtaattcaagaaacaagtaatacaaattattatttgaattaaatataaaaaacattacttactcatcttaagtggctgcatatctgcagaatctaaatatgttagctttaaaaattattcaaatgaattaacgttaaatgaagtgctgaatgttcaataaatatttaaatatcaataaccttactacatgttaaataaaacaaacttttaacttcatgaataaaaagtcctattcataaaaacaacagaactactcagccataaacttaaagagcaaggtacatatcctgcattaaaaccatttttactaagagatatgtgttggagtcagctaccaaaaatagtaattttgctttgaacaacttagcttaagccgttctttgtaatagtagttagatagcagagcagtggtgtattaaggctattttttttttttgagacaaagtttcactcttgttgcccaggctggagtgctgtggcgcgatcatggttcactgcaacctctgcctcccgggttcaagcgattctcctgcctcagcctcccgagtagctgggattacaggtgcccaccaccaagcctggctaattttttatattttaagtagagacggagtttcaccatgttggccaggctggtcttgaactcctgaactcaggtgatctgcccgcctcggcctcccaaagtgctgggattacaggcgtgagccaccgtgcccagccttaaggctatttataatttatcatagcaaaaccttattaattaaaaacataagcataaagaaaaataaaaacaaaaatacaccaagtattttcttagaatatatggaaaacatcttgaacatattcaggcatgttctacatttcttggtgagaagatatcataaaaatgtcacttcttcctcacctatttttcttgatttcatgtaattccaatgatttttgagttagtgtttatttaaaattaatataaaattcatctggaatatcatgagctgatcaagaatatccaaaacatattttggaaaaaaaaaagaagtcaatttaggcaagaccactcccattagattgcaaacatagatgatagatagatagatagatagatagatagatagatatcaaaaataatttaatccatgattctggtttaaaaataggaatatagattcatagaatatagtggaaagctcagaaatagatgtaaaaattttaaagaacagatatcataaaataagaggaaacaaaaattatttcataaaatgtgtgagataactggcttatactatggaaacgtaatttcatattttacattaaatataaaaataaaatttagactaattaagaaattgatatgtaaagcaaagtcacagaagaaccaacagaaaatgaagttgaacataatttgaaagtatgatcatttattttacctctgaagcaatatagtatgtaataacaaaagaaaaatattcatatacatgatttccttttacaaaaaataagagttaacttggccaggcatggtggctcatgcctgtaatcccagcagtttggggactgaggcgggcagatcacctgaaggtcaggagtttgagaccagcctggccaacctggtgaaacactgtctctactacaaatacaaaaaaattagccaggcgtggtggcaggtgtctgtaatcccagctactcgggaggctgaggcaggagaatcgcttaaatctgggaggtgaaggttgcagtgaaccaagatcgtgccattgcgctctagcctggctgacaagagcaaaactgtgtctcaaaaaaaaaaaagagttaactaaagcacacacttcaggaaaatatttgccactaacaaaatattcatcataatgtaataacactaagaaaaattaaaaagaaaaacatcaatacaccaaaaagtaagtgggccaaaacacatatattctcacaagaggagattcagaaagtagatataaatatggaaatatgttcaacctcactagttttcaaataaatacaaattaaagcgataataagctatgctaacacccagtgttggtgatgccaattagcacaacctttttggaaagcaatttggcagcatgtttcaaaagtcataaatatattcattccgtttgaagcattaatttcagccttagaatcctgaggaaataacttgaaagaagaaaatccctaggcatgaagatgctcttgccgtagcatttatagaattagaaacctggaaataatgaaactgtttagcaataacgaatgattcagtaaaataagatatgtcgatctgataagagtgttgtgcagcaagcaattctttggccttgtgaatgttgcgggctaattgacaccccagctccctctgcatcccacctgccctttaagtcttcactccctctttatccagcttgattcacgaaaaagccatcagcctggtaaggagtcctatactgggtttcttaggacgaagcttcagctttttaactgtactcgcctggaccccaagttacgcaaaaataccttcacctcactggctcctctctccttccactgcacctgaaaaaaacatgctgtctcctcttttcaggtccactccaacctggtttctgccccagtgttcccctgaacctgttcttgctaaggtcactagtgaactccatgcagccattccagcggacactgtaaggtcctcatctaacttggctgttagccagcattcttgaaactgtcttttccattgctttccatggcacgcccactccatgctctcctccttctctgtggccaggcctcaattcccttgctgggccttgctggtcccttccctccctgtctctaaatattggagccatttaaggcccagttttggctcttcctctcttcttactctacatttcgtctgtagacaatcttattcacttccatggctttataaatcatctgtatgttcatgtctcctttatccccaccccagattgatcctctgagctccaggcccatacccaacttgacacatttgcttgagtatcacacaagtatcttgaactacatacacctaaagctgaagtcttgaatcttctacccatctgcctctccatcagtatgccccatctccatgtatggtacctccatccatcccatttgctcaccagcatcctccatatccacatcccccacttccagtcctgccccatgccacttctaaggggtaccttgactgcctcgttctttcccttttcattgtaccatcttagctcagtcatttcttgatgattccttgataccatgtgaccttccagttttattctggtggaatgttctatacttctactagtctataagctctttgagggcaaggaccatagctgtttggttcactggtatattcagtacattgtgcagcacttggcacatgttgcaagcttgatgaacatttatggaataaataaatggaataattatagttatgtaaaagctacatatgtgagaactagaaggaaatgtggaaactttaaaagagttggtgaaaatgtgatttttaaaaattctgatactcttgttataacgtttgagtgtgaattcaatttaagacatatatgtatacaagataagatgtgtggtgcggatataaatgctgcgttgaagattgagcatgaatgagagttcaggcatttgttgaagatgagttagtgggaatggtttgggatctttcactgtgctcagaattccctaaagataattgaactccagtccaggtgaagtggactgaaagaacttgccttcttccagcatgataatatggccagaactttttgaaaatgggaagataggggtgacctccggggactagattagacttagcaagcttatcaaagaaccagggagacagcagagtcttaggtggcagtgcctaagtctgggaggaagtgagaagtataacagaagacagagagctgccaggttgtctagactatggctcttcatagggggtgataaggttaccacttcctgcactcccaggttccttttacttagcgctcattcccatcagatcccatcatgcgcctgatgcaaaaggagtccactgttggcatgttaattcctataatttcccttctgaacaggacacctggctgccttgttcctttggaccatttccttgggaaaaagttactttggggacatttcaagattgtctttttgtgtccctactatacacacacacacacacacgtacaggcacacagatgtatccctgtacacatacaaacatacacacacaaaaacactccctccacccaattttgatcatatgtttgaccacaagcaaaaccttaactaattctaaagcacatttcacaggccaccttctttaatcattatctaacaatattagcaataaggaatagttgacaaatgtatcttcacacctaggatcatcaaggcacgctgtcttaaatgaaccccagatcaaagagaaacagatgaaaaaagtcatgtgtttggatgggaataattaatatcataaagacagaaatttttctaacattaaggcatatatttaatacaatttcatttagactcagtcccctcaacccctttggataaaatgaatatagatgaataatgctcaggaaatggtaagaaaattatgaaaatagagataaagcaggagagatttgccttatcagatgctaaatatatttaaaattacaggagtaaaaacttaatggcattggaatagaagtagatcaatagattattagagcagagcagagttcagaaatagattccagataaatggaaatttaatataggacaaaatgatatttcagttcagtgggaaaaggaggtttgtttttgtttaataaatggctgtgacataattgattaaccatctggataaagttggacccttatctcacactgtatataaaaataaattccagatggattaaagatataagcttaaaaaataaagcaataaagatgttggaacaattttatatttgtccataagctagagtttgggaagcactttatagccgagacaagaaaccctgtatttgattactcaaaagcacattgtgtaagggtaaaagatgccacaagcaaaagttacaagacaaacaatagattaggagaaaaatatgtgtcagaaatatgacagataaagattaatatctacaccatacagagagctcttgaaaattgataagaaaaatatacacacaaagcagaaaaatggtcaaagaataagaatatgctctttacagaagagcaaaccaaatagccaacaaaacatctattcttttatatttttatttatttatttatttatttatttatttatttatttatttatggaggcagtgtcttgctctgtcacccagaaacatctattctttacatcagctcttctgagaaattctccctcctgtggcaggtcaaagggtgagatcatatgaggctctatgatggatggaaatgaggcaaaaatcatcattttttccccatatcttccccgcacagactacagtgactatggtgggaagcttctctccaagacactcaaagtgcatggtgaagaatgtggactctagcagggagctctgccagaataaaagtcagcccaaccggacctgcacctgtagcatcccaaccagagcaacctacaaaggtatgtggattcttctgggttatttttgttataaaatcaaaaaaacaagggaacctcctgagtttagtttgcccaaggaatatgaatagttccccctctgtagactcactccctcactaccccctggttcccacttttgctctgggtcctcctcacctctggtttacctcattcatttactccaagaccccactatcagatatgcctggacaatgacaagagaagggcaagttggataggagagtgcagaaaagccagatagcactgggccgactacccaaatggtttagataattcagagatctgaaaagcaagaaatgccctgggtgagatgagaaattttaacaaccaatgttccatcagtttgagttcattgcattcatacatccatccaggaagtatttactgaacatctactatatgtgaggcactatgctaggtactagggatacagtgactcccccttgcccctaaaaaaaagactgtacactgggatagagagaagtaagtagctcattacaatgcagtgtgtaaatacagggaacatagagtaccatgagaagcacatgaaaaatgtaccttaccagacatggtggagggggaaggggtaaggaaagcttcctggaggaagtgatgtccagacaaggtgagggtagagttgagccagacaaagacgatggggatgggtatttcagacagagaccaacctgcatgatggccaggagacaaaaagctttatttgaagaaccagaagagcttctacatggccaaggcacatggggtaggggaaggtggaaaggggagacggagggaagatagataccaaaggaggcagccaggggaccatgaagggccttgtgaaccgtgaatcctgcgagctgtgatgaaacactgaaaggtttaagccggaggctggcagcacaatcagatttttattacagaaaggttccattgtgcattgtctgtctttcctgctggaatgtaagccccatggaggcagggacttggagaagacatcttcactgctgtgcttagaacagtatctggcacaacgtaggcattcacaatcaataaatgtttcttgaatgaatgaatggcttgaaggtggagaatggaccaaagaagggaaagactgaaagactgagttccaacagatcacttggaggggtccaagtgagagagaaagtgaaagcggaaagctactggagggtccaggtgagagggaaagtgagagctggaggagaagccaagggggatggagagaagtggattcaatagatggtcagtaggtacggtgggcagactgaggactcctgagtctcttcgaatgagaaagactagaagtagagttgagttcatggagtaggtctccaggactgagtgatgatcattaatggagctgagtgggttttatggtgagagctggagttacccaatatcttagtccattctggctgctataacaaaataccttagactggataatttataaacaatagaaatgtattgcttacagccctggtgactggggagtccaaggtcaaggctccagcagattcagtgtctggtaatggcttggcctctgacttcgcagatggtgccttgttgctgtattctcacatacagaaggggcaggggagctctcttaagcctcttctataaggacactaatcacattcatgagggtgcagccctcatgatttaatcacttcacaaaggccccgtggcttaatactatcacattgggtattagattccaacttatgaatttaggggagacataaatattctgaccatagcacccaattgatcctaaatccttcaaaaggcaatttaatgcaccaggccagagaagtgagcttaaaaatgctctcagccactgggtggtggctgtttgggtctgattgcttggaaaatcacctcaattttccactttactttgtccacactgtgcagcctttgtgatgcatttctggttaattttgttcattaaaacgcagaccttgctcacctataaaatatgcctctaaagtatttgagatcaccttgtaaagctagttggttgcttttagcgcctccatccgttgcacccaacccttcacctgccgttttctgaatatcttacatattctgaacgggcaaacaaatttgcttcccagcctcttgtactcagccagccggtgaccattgccaagcctttatccatggccttctttaaacctagaatggcttccccctttcacaaaatcctgtctccctttctgctttgaaacattggagaaaagtcacctcttccacatgcccttgccagattctgctctgactttctcagccattctaacacccctttggtcctccatgcacacccctatcttggcacccaggttaccagagggaactgaaaccactcatatggttgtttccttgactgtgctgtcatcacctaaattattttacctcttccagaataactgtaaatgctttcctagaagaaatcatgaatattcatttccttgtgatatttccaaatagagttttgtgcctatttggtgcttgaaaaaaagtatgacttttgcagtcttcatcaccggacacttatagattccactggagtgtattttcactgggagtccctctgagctgactgtccctgtgttcattctactcacatgtatcaagtgtctgttcagaggcttttgcagagaggtcatgccagccctccaagcctctttgtcttgagaacagaagatgatcatttcacacacaccctctgtacgtgaaccgaattttatgtggaattctgactttcagagggagtgttattgctgtggagaaggaccttaaagtaagggtttttagactttgggaaccacacactaataaaatttcaatgagaaaattagggttgccaacggagtcaagccagcttcttattttgtcaagacttagatttaaaaagcaccctctcggccaggcatggtggcacacgcctgtaatcccagcactttgggaggctgaggcgggcagatcacttgaggtcaggagttcaagaccagcctagccaacatggtgaaaccccgtctcaactaaaataaataaataaacaaacaaataaatagtaccacctcctattcctattaattcaccaaaggaaaaagatattaataccttgttattagcactggtccgtggacagaaggggatttgaaaggtgctattctgtgttgtggccccaaacctgggctctatacaattgttccatggggagcaatgcaaccacaggttcctgggtccaccccaggcttgctaaatcagaatatttaggggcatggccctgggatctatagctttgtaaatttctcaggtgattctgatagagaactgggtttgggaatcactaccttggatagagcatatatgtttaaagagatacaggaaatactacatttctctaatgctgatttagtagttttgaaatccttgttattttgttcttttggggttttctaaccaatgagtaggttttcaaaggcaaataagaaaacctttatcacagatttggtgacagttgaccccaagaagatcgtggaacccagcccatggaaactacactttagagtatgttaggtaaatatttgcagcgtggatttttctgaaggtgcaggatttctaatgctccggttttcatgttctaggcacttcttgctcggtgacttgttttgttcttatgccttggccaattaaaagctgagatagtgatccctaggagagtatgagatgtaaatgagctgtaaaatggcttcttcctagtgattattcatgggaggcttggaactcgaggtgggttcagtctgtttggaggcttgagctgtgcacttcggctgcctgatgcgaatggcctatggggaaggaaccacatactgattgaaatgttagcaaacagctggcacgctcctgcccactatgcagaggaagcaaaaatatttatctttttttgcatttacagctatgcttgactatagcaggactccaccgtaaatgacattttccccccttccctccagatgtttcagttgtcaacgtgatgttctccttcggttcttggaatttatcagacagattcaactttaccaactgctcatcattaaaagagtaagattttatttgaaatttgaatattctctcgttgatcttaatttacttatttgtttgactcctcgatttcctaaagaactcttttgtgagacagaactttccaaaatgccttttgaagcatggtgtaatgggagataggagagccaccgagctaataagctccgctcgcacattctagccctgactagtaagctggcgctgcgagggagagaaatcccctgtgcttaagtgttcatacccacagggaaatatgtcttcccaggaccgagaggcagccttgaagtaagtaaagaagaagggacaagccaggtgtggtggctcacatctggaatcccagcactttaggaggctgaggtgggcagatcgcttgagcccaggagagtttgagaccagcctgggcaatatagtgagacgccatcgctacaaaaaaacacaaaagttagccaagcatggtggtatgtgcctgtagtcccagctacttgggaggctgaggtgggaggatcacctgagcctaggagatggaggttgcagtgagccgggatggcgccccgcattccagtctgagtgacagagtgagattgtctcaacaaaaagaaggagcgctgctaggttctcttctgattggaatggcttcgggaatttgggcggaacgagaagccttgagtgtaggggtaaaaagtcttacttgagaaggacaaggtgaagtccctttcaccaaaagaacatgttcctgctgccccccttttcaccatctttggcctctttgagctacataggcccctgagttagtgccaaacctcactccttgcttctaaagcagcaagaggacagaggaaatatgtttctcagatgcctgacttgccaattggaagttgggatggaggcctgcagggcaccttgggaggctgcatgagtagcagtgctgtagatcactgcatagtttgattgaccagttatgtgagcaccaaatgggagtttcttttgtcctggcctgggaaccatggtttctatggggaaaatgaatttgaacttgaagctgagctaggaggctgctcttgaatgattagaacaggagcccctgggcctcatctcttccactgaggcactttgaaaaagatgacacaaggcccagttcaattattgctaagaaacagaatggatttaaggagaaaaaaatacaaaaattgctacagaaagcctcagaagttcatgaaaataggaaaaaagggtgtgaattaaatagaattatatagctcaaagacagttgaaagaacgtagctcccccgatgcccactttaaggccagatgaaaggaaccgactagccccaggtcccacaacttggtaattaagaaccagacctcagacctaggtcccccagggagggtgagcgccctttccataggtaactgcttcctgttaggaaagcacttagtacagtaatcacaccctgggggtagaagaagcgagcaaatcacaaacccgtgtctagctcacttaggtggccggatccacgcaaaagccagtgtgtcctctccttccacggaaactgcagtttctgtagatcagaatctcagaatgtttcctcatttcttggagaaggtataaaacaaactgggtcccccggccctgtgctagcaccccttgctagagctaaggcttcctctggcctcccttggccctgtttccagatcaaccctgatttccctttttaacattccttctcataagtgcttttcaagtcctccacagtttacccaatcatgataggtgatttgattagtagaaacacaattcttccttaatttgattataaagcaaacacaggcacctcgttgcctctgcttgccagctaacactttctgtctcacatcttccaggcagttggcagtgtgactgctggagtgagtgagggcttcctgattttggaaggcagagtgggtagaggcggggagagagagagatccatctccagagggacttacctgagggtagacaaatagcagaactggattcagaaacagattcattgggttcctattatctacagaccagcaggtgacccagcttcaggtttccatggcaacacccctgcaggtgccattccggcccatcaacctgagggcttccaagagcagggcacaaagcctcacaggaatgtctgtccagggatttttttttttttttgccttcttttaaatgcttgcatgccacatcacagagggaaattctaggatgtgaacattgtcctaaaacgcaggaattaagtcagttttctgtgttgctagatgcccagcatgcgtagaaactggctgcgcgtggtgtaaaagtgcaagaaggtgtatccaccccttcacagcttgcgacccttctgattatgagagaaaccaggtaaagtgacatttttggtattgtaagtcttaaccgccgggcatggtggctcacgcctgcaatcccagcattttgggaggtcgaggcgggtggatcaattgaggtcaggagttcgagaccagcctgaccaacatggcaaaaccctgcctctactaaaaatacaaagttagtggggtgtggtggcgcatgcctgtaatcccagctactcgggaggctgaggcaggagaatcacttgaacccgggaggcggaggttgcagtgagccgagatcgcgccactgcactcccagcctgggtgacagagtgagactccgtctcaaaaaaaaaaggtttaaccaaaaataaatgtttgtgactgcctggtcctaccttctcttttatgtttgttgcacactttgaatttaccacccatctggatgttgaagggatgttctccattccaggaacagtgtccagtggctgtcgagaagacatcaggaggaggaagacccaaggagaacaaggggaacagaaccaaccaggctttacaggtcagaccctatttttgtgtggttgaggggaaaacctgtctttgaatgaccatgaccacaactcatactactttgggttccttaaaaaaattctctattttactttctaccaaaattcccttttgtgtctttggttttttaaccaagtttcacttaattagcgcaatacatcaatggctggacactcacataaaataaattaaaactctgtaattatgaaaaatgatgttgctctggtcgaaataaaattgtaaaggtgactttgcggctcactggtgaagagctggaaggaagtttagcattccatctgagggatttcaacttgcactttatataattgcgtttctgggggttatgtgtgtggatgggggtctgtgcaaagtgtgcaaactaacctcgattccgttgttttttttcaactttgtagggacgtctaaccagtagtgaacactgctaaaccagaattgttatagaatgtgtatttctctcgccttctcacaagcagttattaatccatgaactttccttggaaatgcccgttattttcttcatagtaaattacataagcccccacgtcagtcatgtttgaaaagaggggacatgtcaacgtaaacatttctgggcggaacacatgtggctgtgcttacaacttcactcagtcaacaaaagttcattgagcatctatatgtggtaaaacacaaaaagaggataagtcctgccctcgctaaccttggagtctagcagaaatagacaaattaaaaatgacagctctggggagaaaagggctccattttccatttctctaatctgtggttttgacttctccacttgctgcttacctaaggtcaagtgcaaaggtaaataagtagcatattttgaatcattactgaaaagtttatagtaacttcaggtgaattaacaaccaggcagagggaatatgaatcaaatggatatgaagttaattaaaggcattagaaaagcttgatgctcaggtatctccagactttagcagtctctgaggtcttgttaagtaatgggctccttttctcatcccattggtttggaaaactaagacacagcgacaaggacttggatcaggaagacagtggctttgtggctttttctttttaattaaactttgttgttgttccagggtttgtttgtttgttttttcgttttgataaaatacacaaacaaaatttaccatttttattgcttttaagtgtacagttagttgaggtaagtacattcacatcattgcacaacctatctccagaactcttttcatcttgcaaaactgaaactctatgctcgttaaataataactcttcatctctccttccccccagcccttggaaaccgccattctaattttttgtctctatgaatttgactactctaggtacctcatgtaattgaatttgtctatttgtgctggcgtctttcacttagcatgatgtcctcaaggttcatctgtgtggtcgcatgggtcagaattcccttcttttctaaggttgactaatattccagtgtatgtatataccatattttgtttatccattcatccatggattaacgcttgggtcgcttccacattttagctatgatgaataatgctactaggaacgtgggtgtgctgctatttcttcgagaccctgctctcagttcttttcggtatatgcccagaagcagaattactggattgtattgtaattctctttttggttttttgaagaaccattgtaccgttttccatagcaacgataccattttgcattcccaccaacagtgcacaagggttccagtttcaccccatcctcaccaatacttgttattttcgattttgtttgatagtagccatcctaatatgggtcaggtggtatctcattgtggttttgatttgcatttccttgatgattaatgatgttgagcatctttgtgtatgcttgctggccatttgtatatcttctctggagaaatgtctaatcaagtcctttgcccatttttaaaattgggttatttttgttgttgttgagttgtaggagttctttatgtattctgggtatcaaccccctatcagatatatcatttgcaaatattttctaccattccataggtttccttttcattccgttgactgtgtcctgtaatacacagagtttttaattttgatgaagtccagttcatttattttttcttttattgcccatgcttttggtgtcagatccaataaatcattgccaaattcaatgtcatgaaactttctttctgcatttatttgtaaaggtctgtagcacttatattttggcctctgattcattctcagttcatttttatatatggcataagaaatgggtctaacttcattcttttgcatgtggatatccagttttcccaacatcatttgttgaaaaaaatgtcctttcccccattgaatggtcttggcaccctcgttgaaaatcatttcaccatatttgtgagagtgtatttctgggtgttcttttctattctattggtctatgcctgtctttatggcagtaacgcactgtttgattactgtagctttgtaaagtaaattttgaaatcaggaaatgtgaattcttcaactttgttcttctttttcaagattgttttagaaaataataaacttttaattttgagataattgtagattcacatgtacttgtgagacaataatacttaatatcttttacccagtttccttcaatagtactatcctgcaaaactatagcaaaacatcacagtcaggatattgacgttgacagcagtcaagacacagaacagctctatcatcacaaggctccccaggttgccctttcacagtcgcatccatttccctcctccctcccattctccatctctgatgcctggcaaccactgacctcagctccatttctataattttatcatttcaataattttatataaacggaatcatccagatgtaccctttgggggactggctcttttaactcaacataattctctggaaattcttccaagttcttttatgtatcaataattcattcctttttatcgctgagtcgtggtccaggcagcggctttttaaacttctttaattttaaagataaatatcataaagtcactacctcctggtttcctgcagtgtatctctctgcaccctttgaactgtgtggttaaaaggactggggtcaccacaagagaagaagaaggctgaaaataaacaaaagcccagatctgtttttagtgcttctctgtggattacccctctaagtgtggagaaagacattttgttgatactgacatgttttctttaaatatgtgactcagagcagaatctctcttttgtttgatagggaatggagtgttatttgtcacaggagggatttctcgtgctctgtcaaacactgctgtctttcattatcaggtggaatgtgtaacattctggtttccactttgggccttcatgttggccttgaacaaagcacccaatgtctttgtgattctgtttctaccagagaagtcactcacagctttgcttcaatgcatctgcccacaccacatatgtactgagtacttcctgtgtgctaggcactaggaatggagcaggtactgtcctaggcgtctaggatcctgaacttgagttgattctttctagaggcatttattgcacacctattagatgcaagtataccgacctccacagattccatgaggaggattcagatgaatcaggcacatctctggccatcagtctcaagaatcttatccatgagtacatgagtaaaaatacaagattttaaaaatattaatatgaaggtacaagaaagtacacagagagcctctctgtgcccggggctttgtcttagtccttcctgtttgcttaaacccagtgccttgaagttgaaaacacttaatcagtgtggttggttaagtctttgattgatggatggattgattgctggagatggcatttcagcccacctttgaggacgagaagcatccagacacatgaatgcgggtatttgaagcagaggaaccagcatatgcacagtgtaggggtaggagccagaagattccaggacacacgctagaggaaaccctaagtaggcacagaggatgcaggaaattatgagacacaaggttgaaatgaccctggagcctgcatatatagggcctcacataccagtcctgtgagtgctcgctttattcttcagtggcaatggaatgccattcaaggtatcttattttatttttttagtgtatgagtttgctaatccaaggatctggtacttatgaggtagggtcctggttcagtccctactaggccagtagccctcacactgtttcatgaccccaagacctactcctgtatcctgaccctgaaacgtatagcgtcatctgccaagggggctgagttacagaaaagtgtgaccacaatagagaaatgagctcaaaaatctatgtatgaccttggaggaggagtatttcaagctataaaggccagtgtctgaccgtctgtctgtttctttccacatatctagtagttgaaaccttgtcagggaccgttggcccttttaccctgccctgaccacttctccttccatttcttaacattctcatatctggtgccttcactcactgagaccagagatagttcccctctcttttgtgcattcaaggagagattgtgaagatttatgatatgatgtcattctaatatttgttattaccctcaatatgcttatcactatagggcagaaataaagcatacaaagtcatatcccctggcaatttacattcaaatggttctttctcttccttgcacctcctcttctcttcctccatcacttcttcccccctccgagatggagtttcactcttgttgcccagggtggagtgcagtggcacaatctcggctcactgcaacctctgcctccccagttcaagtgattctcctgccttggcctcccaagtagctgggattacaggcacccgccaccatgcccagctaattttttccaatttttagtagagacagggtttcaccatgttggccaggatggtctcgaactcctgacctcaagtgatctgcctgcttcagcctcccaaagtgctgggattacaggcatgagccaccgcacccggcccctccatcacttttgaatatgcatttttgatctctcacaggcaatccagatgaatgcttttggggaccttgccttcaagagtgaaattaaatttcacatataccttgctgagtagcttctatgggcctagcatagagccgggtactgtagaattaacttacaatcattcatttattcattcattcaaaatttgtttgctgagcaactactatgtgctagacaggcaggcaaagtgtgtgactgcatggagcttacatggtagaacttataatattttggaggaaataagattcattttcatgaagcagttgcatgtgcacaagagaaaaagatacaagagagaatgccagaatgtactcaaatgaacagtggtagctaagattcgctgagcctgtgccatgccctgagctcagagtatctaagcctcacaatggacctattttccccattttatagataaggaaattttagctcagagagagcaaatggtaggtaagaaatatgaatccaggcaatctgactcaacagagttttaaccattaccctacattgtatgccctaaattgaatataaacattggttaaaccatactactgatgatattaataaaagtcagtctggaaaggactctaatattggcttctcttggcattagactgtcaaagcctgcccccgatccatgccacacatgtagggtgggagcaagacctccaacctggccaggatgtgggaggagtgtattaacctcaaagacatgggagaaaggggtggggcagggtgtggtccgagggaaggagtcagacccagacacggctgggcatctgctccaagacagggagagcagaataggcttagtgaggcaactgaggccctggggagaggggagcagcaagaatctcatgcatgagtcgaatcttggccaaagggtggactttgaggggctgggtttaaattagaatcagggccctccactggctgggaagagctgccctccctggccctggagttttggtcacccagtccaggtctggggagccacactcagaaggctcaaatgccaagaggaatagcaggttgttcggagggtgggcttggcagccaagtcagcctccttttagagtctgcagctcagagaagtgagtcttgatctcttcgcacagggcattggtctgtcaccttctatctggaagtctcaagctctgtgtccagaggcactgctcactattggcatttccagggccaactgaaatcacatctcaagttccctggagcctgtaccgaggggcccccgtgaaaaggcatttgtcccaggggctaagcatcaaatggataaccattttgttccatttcacactctaatttttcttgagtggacctgtattttgctattttctttccatatctcacctccttttactctttcccatttccacggctggttaccactcttaccaatttatacatttcattaatatattagttctatcctcttctcagtcattaataaagatgttaaataatcctgaaccgaatactcactcctgtagggccctacaggactctttcctttaattagttgtgctacctttcatctatctaatgtccttcggtttcagatttccagctggttttgaatccatgtgactttttatctagtcctgtttgaactaatttcatgagtgaaaatccgagagatgttttactgagtgttgattcaggtccaggcctacagagagtttgctatattcagatttttttttaacagattaatagagtacaatttggccttaataaactgagccctcctaatgcacctctttccaatattcttttcaatcatagcagtattttctccattaatgtcatggtaatttgaattgtgttgacgtcagacttcacaaaaggtactcttactgtcagaagtaatcctcttagaccttttgaaagataactatttcttagtggttgtgctatttccaatatcctataatgacttagttaaaaataaaaaataaaaaggatcgggtattctataaatctcctaattaaccagcttctaatgtgctttcttatacaaaacagggactgaaagccagagctcatagtagtttattaaataagttcaaattgtgcagccatttaaaaataaccctgaagtctttaaaacgtaacctacaggaagcacactattctgaggttaattgctggacaacatagggctgtgacggttatagtcaacggtattttgatttgaatacatagaaatccttggacatagagtgagggaggaatcccacgatagggctctaagaatttgtctctttgtattgagctcaattatgttttacaattaactccctctaaaatgcataagcttatagggctggctactatatgccaggttttatgaattaactcttgatgaaaatacaaaaattgatctaaaatattgaatgtgtagaacctttatggggaaatgattctttgctcttttgtctgtactggatttttcaaaatctttattggtaaaaagaaagaatgtatttctaagaattgttgcaaccatacagggcagccatggagctgactctacattttgttttaaaaatgttgttttatacctgcactatttatttaggagggtcctcttggtagctctttaacccatttattaagattagaagaggttccaccagcaaacaaaagacaactaatctgagtctgtttaaaagcagactgaagcacccactttcacaagacaggccagggctggattccatcctagatggccaagagaaccctctctaaacaataggggtttaaaatgtttttgaagtagcaaggcggtctccactcagggaaataaaaagttaataagatgatgtggcaagtcctctgatggtgttcgtagagccatttaaggagcaaaatataacttccttaaaaaatcttttttacattagttgtaaggctctctttatcctctgcagagaatggagaagaagcatttacttggcatgtttgaaaattttgcttgagcagacatcaacagtataaatataagaagcaggaaggactatctagaaagaaaagaaacctgggaatcatagttgacttggatgtaaacgtgagtctgcaatgaggtttacataaaaaaagaaaaaaaattctatcttgctcccctaagaagacagtggactcctctagagcagaggtcggcaaatgttttctacaaagagccaagacagtaaatattttaggctttgcgggccgtatggtctctgctgcagctactccactcgactgctgcagtgcaacagcagccagagacactacccagacgaatatttatgggtgctgaaatttgaatttcatgtgtttttatatgtcatgaaatattattcttcttttgacattttgtcatggcccatacaaaagcaggtagcgggcaggatctggcccacagactatagtttgccaactcctgatctagtgcacacatagatcatgtgtcccccacaatatctggcctaaggaccctgtaggtgctcaataaacacttgttctcttagctgtcaccacgtaagagcgaagagtaagccttttgctatataacacacacttgacatttgcaagagatttatcttgaaggctttgctaatccccccattccaagtaccactctagcagataatttcccccataaaatgcagtcaagtataacagaataattaaagtgaccctttcaggcccttagtgattctattaatacagggctaacgtccttcacaaagtgattaaaataaattctgctaccaaaatcaattctgtgtcatgttacatcattgctgtgatgacattaacaatgaatttacctcaatctgcaaaaccagtccaaagcgctgatgagtgatggggacgactgtgccgtgtagcacctgtgtgtgctggggagcagaatgagaaaatgtctgtttgagcaggatgggcagcccctgtagcccagcaatgccaccccaatgagtgttccatgtacaaaggagcagaggatactcaattgcttcaagaagcaggtgttaggcaggtgttggacatcacggagttctcccagtggctcaggggcttcttcctggactcggtcctccaagtggatgcactcagcatttagaatttcaccaaacgtcatgtgattaagcatctctggactttggggtcattttcaaatatcaagactgagtatattctgcgatggtagaggatataggggaaaaaagagtgtgagtatgatgttcactcttgctgaagttctgctggactttatattgggtagaatcttagaatcttatgtcctgttttggtcaccgtattatagaagaatacagacttgctgaaaatggtctacaaaagaacagtgaaattatcagaatgatagacagtagcatctgtaacataaaagtgaaagaactcaggattgttttatcttgaaaagggaaaatgattcttgctatcaaataaagggctttttttttaaagggagaatttgattagatatcacaaatggagaagtaaggtggcattcacctatatggtatgaagctaggtagcaagggactccaagggacatgttcttgaccttaggcctgataaagtctattgaaactgggtagcaagaaggaggttgtggtatctacaaaccttggttggccacagtggtttagacatccaactacttgatagtaggtgactgaacaggttgatttcttgaggtttttccccctgcagtatcctcctggattcaaatagcctcactgtaacaaaaatatgactgctttcttgggaactgaatttatctggaatgacatttatttcaacttaacgatgagtctgtcattggcctacggtcaatggactctctttcttttccttgattttgcttacattgtgagcctccagaggctgtaaggcagtaaacattttcaaaactctagtgatacctcactcttcagacagaatatcagacttttcaactgtattttcaactgtcttgtgagacaaagactaattggtttgacctcatgctgtcacatgttgagagacatgaatctgcagccctcttccttgaattcattgatttcattaaacactgtctgcttgtgttcgcaaaatgttgtaatttcccagtgatttcttcgaactgcagcgtataaacagatttttttggagcgatgccatttcttagctttgatctcctgttttaatcttttctttccaataggtcttctacattaagtccattgagccacagaaagtatcgacattagggaaaagcaacgtgatagtaacgggagcaaactttacccgggcatcgaacatcacaatgatcctgaaaggaaccagtacctgtgataaggatgtgtgagtcgaaatactaataatttatcctcggtaacgtaacgctcaaacctgtgccaaaggaatatcagtgtgattataaccttaatatagtcaaattattgccatgccccaaagcaggccaattagtcagagtatttgacataatataattccaacacgtaaaataattttcacaacagatctgaagttcattgtgagagaatctgttctgtgttattccccaaaaatctcagtatatagtcatttcaggatgttgcctgtttggggtcttgattcattttcagtaacaaaatcaagtatatggagtagcaaacatcattctttaggtgatgcacttggaaaaatagttgagtaccttgaaatttgatgaggaattttttggagcagctcttccagtgtgccacccaaagttgaaaaaacaaaacctcttggatccattttatgtggacattttattctttgtagccttctctttactggtttggtttcagcctccaaaaattaaattactactacatataatggtagtaaaaaagaacaccccaacataaatatctggtcaatgtatctcttgaacattattatttctgtcacttctttcccaaactcatcacatcggtgaaacttggagaaagacttttcaatttctaccgatgtccttgtgcaaatggttactcccccttcgaaaaaaaaaaagtgatgtgataactgcagttattaaataacacaacagattatttgagttttctgcttgttaactcatataagtttgggctaatttgaagtaaaagatgttacagtctacatagagtataatactaagcttattttcatcatggaaatgcatttaagacaatctgctgaagcgtgatgttttgatttttaactactaaaacagatttgtacagcattctaatctgctatgcttatttactgaattttcttctttaattcattttctgcacatcactgccatgcccttcccctcatagcagtaaatttggaatatctgtgatcttgatgagaaaagctgctcattggtggcttgcctgtgttctgctatttgccagaattatcaagcacacattagaggctgtatctatgcaacataggtttttttgtgctgtttatcctggctaaataccttattgcaaaaatctttcattttatgtagcgaaatctgtgaagttagacacctgtgtattcactgaaaggcaatcaacttcatggaaaataagtagtttttcggagcattaccctgtttctgactctttatgttctcattttaattccgaatgtgtcttgagatactgcagttattaaattaaatgactaggagacctttctgcatgtcgcatttcagtaaccacatctgtgtggtgaagccaagttcacaagcagtcaacataatactcagttaatcctatacctgagcccaggctgtaatcccaagctcttttaatatggtacttttaaaatgggtaattattttaaagagaaaaatactagtagtggaatgacctacattttcacctctcttcttctgaaatttataaacaagtttgaattttaatgttcaaccactttatgataaatttcctagagctttgctctgaatataaacctgaaaatgtgcgtctgaggtggcgtaagtacaaactgactcagatgtttttgaatttgccttatcctaaagggttagtgatagcattaaagttaatcatcatgcacatggcctttaagtagtaataacagattctcatgtagcacggttatactgagcattattcagacacaacccaggcttaatgatttgtgctttagaggatcattgtagacacacagaggaagctgcaggtgacagcgggaatgtcggagaaagcttcgctctgactctgaaagggcgccaagcatcagctgttggacatcaggagcaccctggacagccccagctaagtcccagcctggatactccttagggagcatgttggccccaatgctgattgattctgagatgcctgggctcttggtttaggccccctttgaacagcagaatttccatctctgtctggtgctgtgttttaccctctcagtgcttgactagggctttttttcttaagctttttattatggaaactcaaacataatacaagagagatgagtgtaatgaacctctctgtagccattcccggtttcaaagcctatcaacattttgccaatcttgcttcatctatcttatctgggatttttgggggggcatgataagaaccaaacaccatatccttcactgctaaatacttcagtacctctctaacagataagccatagtgccattatgatactcaacagaattatccacaattcttaacataatgtaacccccagttcatgttctgctttctattagtacttcttcagggcaatggttacacctccttcctttcccacttctaagggcaatgcaaataagaaagataaaaatgtactaaagaaagaggaacccaacccctaataataccaacttgggtcactggcccctcatgagtcagtagttgcctgcagctgttctgctccttcatgaagtgttgtagttcaagtgaaattcatttgctgtcaccttgggtaatcaactgtgctaagtgtctgtgtcatgtgagagttctttttctactcttttctaggatacaggttagccatgtgctaaatgacacccacatgaaattctctcttccatcaagccggaaagaaatgaaggatgtgtgtatccagtttgatggtgggaactgctcttctgtgggatccttatcctacattgctctgccacattgttcccttatatttcctgctaccacctggatcaggtactttctagattcataatctttttctcattgtggttaaaggtcatatgcccaaagatcattgattttattcaagtaaattcagaaacagtggtcattccaaattcctctcaccgagttctccttaggatttactcctagaaaaatgcatacctgacaagacatttgcttcccatgctcatcgtgaatgctatgagcacacctttttcccttcaccatggctgctgagaaactcacagctgaaatgtttgcctaggtttttgatatagatatatgacactctttactatgtgtccctcctgcttgtgataaaaggcttctttcttacctctttcattttatagactttagatactttaagctgttttgaattctttgggggaaatattgggagctatcaaaatgaaaagcagaatcaaccttttcaagatgttccctaagggggagatggaaaccccaaaataaactctcccagataaatccaatatgttaagaaaaacatttatctccctagttgaatttttaaatttattactattatgtattttttgcattttcatgggtacataatacttgtacatgtttatgggacacgtgatgttttttctatgatcatacagtgaatatgtaatcatcaaatcagggtaattggagtatccatcacctcaagcacttatcatttctttctgttaggaacattccaattccactcttctagctatttttaaatatgcaataaattattgtgagttatagacaccctactatgctactgaacactagatcttattctatctcattgtatttttgtagccattaaccaaaccctctttatccctctctggccccgccacaccacccttcccagcctctgatacccataattctactctctatctccattagaccaactttctcagctcccacatatgggtgagaacctgcaatatttgtctttctgtgcctggcttatttcacttaacataatgtcctgcagttccatctgtgttgttgcaaatgacaggatctcattcttttttgtatgctgaataatactccattgtgtataggtaccacattttctttatcctctaatctgttgatggacacttaggttgagtccctatcttggttattgtgaagaatgctgtaataaagattcctcctagttgaatttaaattcactttcataatatttttattcctaaatctctttaggactaaaatcctaacgatattttctttgcctgacacagtacgaagctaattttcaaagtactctctaggtaaacctacagacaaaaagctttgttaaaaaaaaaaaagaagaagaagaagaagaaaaggaggggaagagaaagaggaaaaaaagtagagaagaaaaaaatcacttttaatattcttatttaagatcaagtgagaggtggctatattagtttgctagggtggacataaagtgccacagcgtttgtggcttaaacaacagaaatttctttctccccggttctggaggctgaaatcatggtgttggtaagattggtttctcctgaggcccttacaccttggcttgtagatggtcatcttctctctatgtcttcacgtggtcttccctctgtatctctgtcctaatctccccaattttttttttttttttttttttttttgtgacagtctcactctgtcacccaggctggagtgcagtggcgcaatcttggctcactgcaacctccgcctcccagattcaagtgattctcctgcctcagcctctctagtagctgggataatctcccctttttataaggacatcggtcatgttggattagggcccaccccaatgacttcgtttaaccttccttacctctttaaccacccacgtctctaaatacagtcccattctgaggcactgggagttagggcttcaacatacattttatggggacacattttttggggacacagttcagtccataatagtaagataaggagaactgaaatttcaaaaccaaggctctagcatgacatcccccactctaggaccaattccattctccatataaaaggagacattgatgtggcatgccccatgtgcctggtgtgttcatctattgactaggttaatcctcacaacaaatttatgagatctgctatggcttgtcccttttgcaaatgagggaactgggggaggaaaagggttcaaacaactcaccccagcctcccagacagctggtactaggaggttgggctctgagccacagcagtatcctgctttgctataaagtaagaggctccctactgttctgtcacctgcgacattctgagcctgtgtgtcttggctgctccttggtcactgtgccttgagcaagaatgtggctctaaatgctggccatcgggagatcacgcttggctcggttttctggtaatggctacagactggcatgaggccaactcagcccttccccattgtggctggaggattcagagatcagtgtcttctctctgccctacacaaattgggttgctcaggcccacctcctggtcttgtcatcaggggctcagctggctgttggacctgacgtacccaggctcttgtcccctagaatgagtgtctggtgacctacgtgaacaggggtgcaagggcagacagagctgtggacagctgtttctttcacacccagtgaccgctttgcttatatgcactgagaaacgtgaagttatttggcctggttttagagagatggaatgcagctgttatttatacggcgtaccaaataggaatttacactttgcatgtcatctgtaattctaccttgcccaaagtgtttcctgtctctctaaataacataccattggtaggttaggagtttgattttgaaaattcttagattgaagtctctttatatagattaaacagtaatcaaacaaaattctgtttagtgaaaccttttcaaggtacagctcctgatctgattatatgtggcgatatgacacaaacaaaattcaaattccatcaaagaatctgggcattttcctagaattaaaataggatctgacctgaatttttatatttatgcatcttgaaacccatgaatttgtggctggtatcctgaaaagattcccaaaattgtcctgtatttgaaattaaaattcattaatttgctctcaaacataattgggtttaatattaaacatgaataaattgatagctttgttcataaatgcaaaatgcctgtgtgttagctatgaaacccttattgttgcttttattccttgcagtggtggtcaaaatataaccatgatgggcagaaattttgatgtaattgacaacttaatcatttcacatgaattaaaaggaaacataaatgtaagtctccagctgctttgtaataatagttgttttcaaggatggttctattttcatcacactatgctatgttgggggtattttttgtttctgtgactttggtgttataaacttttacctatgctatcatatattctatccatgctagaatggaaataataagaccttatccttgtagctgagtatttctagttgcagcaatgaggaaagagaaatgaacttggtacgataagacctgacattttctttttatgtgatttgtggcaagtcaccctaatgaggcaatgcttatgaatatgtgtgaaaatgctccgtgaatggttaaggtgtgatataaagaattgcatttctgtgaagagtaggtggtattgttcccattgcacagagagagttgggttcacagaggttagatgacttgccaaggtcccagaaatcttgtcatgtgcttctccttctcttcgacccaatttgttccctaccatctgatgtcaccttctcttacctttcgtctccccacaggagaaatggtaggaggggtctggtttccacctttgcccgattctcccactggtgcctccagatggggatcctctagagcaggggtgtcaaccttttggcttcctgtggccacattggaagaagaattgtcttgggccacacataagatacaccaacactaacgatagctaatgagctaaaaaatggtttgtgcataatttccgtgatatccaccaccacagataagcaaaaaagtcctcacattcaaaaggctggacacggctgctctagatggaagcttctgatgccaagaggggagatgagggatttcacatacaagtcaggcctccaagtgtacttgcacacacttctaaatatccttccccattctttcttcccctttttccctctccttgatgagatatgtgaggtggctgcctctctggggccctgcctgaccacttcctgccaaggctgacacactccctcctcaggagcagtgtgggttcagacccaaattccgggggccgcctgataggccgtccttacagccttgtggtgcacacattcacctgctgacacagttcagagccacttccaagcctcacactgtatctgactccaggcctcatctccatggtgtgaacacctccagttgaatggctcgtatagtttgaccctctgagcagaggcattacctgagtttgtcacggacttgctctccctcctacttgctgttcccaaatcaagttgaattttttgagcacctactgcaggcaaaacattttgctgggtgcagggacaaaagataagtgagatagtcatattgccttcatggaggcaggcagcaaatctacattgggattgaaagttgaggctgggtgtggtggctcacgattataatcccagcactttgggaggccaaggcgggaagactgcttgaggccaggagttcgagaccagcctaggcaacatagtgagacccccatctctataaaataaaaattaaaaaagttgacagcacagagtatcatcaggttctaggtcctctggttccctaactgttcagaaaccctgtgagtccaagaagacaccatttcttttcacattaaagagaaattaaacatgcatgggattaagtacgcctgcagtatggagtggggtgggtggaagcagggaggtgagttcaggtacagaggacagagtcctcgcaggcccgtgctgggaacatcactcaatcctgcttagtgggaacctagagggtgggtctggaatgaccaagagcgatagctgtaaaactgagctggggccacaaaaagcagcgtcagactgaaaactttgcccttaattctgtaggcagcagggagccactgaagatctctgagcaggaagtgacataggtctaggtacactggactcacactggaccgagacaattagtgacaatgaaagcagtcagaaggttaccaatgggaaaagagactatgcagaaagcagtagactagggaaaggggaggattctgacccaaaaggcttcggtgtcctgtcttgagtcctgggaaaccacgagaaaagaagagagtgtccaacccccagcaggggccagctcctgaagtgcttgttgccgctgaatcactctttgttggggaacctcctgcagggcggttattattttggcaatggtgcacagctgagtttggagaggcaggaactgaagaaaggctgggagcccagtgaggatgctcatgccagtgcaggtgtgtctgagacgtccacagtctctctgggctgacagtagctccctttgggctgtggttagcagagcaggtctcaagtgctggggcatcgtgaagctagagatgaccagcttgtctttatagcagtatcgttgaagggagagtgggggtgacatcatgggagtgagagcacagaggaggaagaaaagagcacctaggactggtggcaaagcttcattttaaggaatgacagacagtaggatgggccgtgaaggtggccgagaaggtgctcagaaaccagtgaaaaagagtaaatcgcatggcgcgagtttgtcacgagtatggaactgtagagtcttgaggataatagggttgggtgatcctctcacctgcaatccttctagaaggcatcttcagtaaaaagccagcctgctaggagttaaggctgctgaggcagtagagacagtggttttcatcctgaggacagaaatgtgagcaggagattcagggctatagtttggaaagatgtgaagggaaaggaaggttgtgcttgtccaaatctcagctctttacatcatattttcccaccaattgcctcttcctattgtcttttttatgctctagtatcagggggtggcgggggtgggggaaaaatagtttttcccacctgataaatttctttttatgagttataattgcttttctgtagaatgtttgccatcctcccctaacccaccagcctcctctgcctgtccttctgtacacctaaacaggacaatatatttatgttatgtatttactaactttttaaattttattttttatatatatagagagagacagggtctcactgtgttacccaggctgatctccaactcccgggctcacgtaaccctcctccctccgtttcccacagcgctgggattacaggcgtgagccactacgcccagcctatttatgtgttgttgtttttttttaatcctgtaaatcaggccaccttttttgcattgttttcagttttcatgctcttcatttcatgggagatgcattgttccttttacttttgttttctcctgttttctgttatgcctgaaaacccttgtcctccttgtgtctagtgacttctgctaaggccctgcaggaggttcccccaacaaagggtgattcagctgcaacaagcgcttcaggagctggcccttgctgagagttggacacttttcttttctcgtggtttcccagggctcagacaggctgaccccaaggacacctaagccccttgggtcagaatcttcccctttccctagcctactgctttcagcctagtctcttttcccatggcataaccttccagctgctttcattgtcactcatgatattaatcataatattaactagcatgttttgagtgcttactgtgtgccgggccctgatctaagcatgtataatctcagttaacgtagccctcatttaatgtaatgtagggtgaagtcaatcctgtgagggaggtagttttgctgtctccatattacacatgagaaaacagaagcaccaagaagttaagttgctcaggtcacttagctcttagagatcacagctgggattcgttaacaaagttactaaaacattcttttctttttgtccaggtctctgaatattgtgtggcgacttactgcgggtttttagcccccagtttaaagagttcaaaagtgcgcacgaatgtcactgtgaagctgagagtacaagacacctacttggattgtggaaccctgcagtatcgggaggaccccagattcacggggtatcgggtggaatccgaggtggacacagaactggaagtgaaaattcaagtatgtttcttttctttctgggtgggatgtcaccccgaccccttgactggaaaggtgtgtttatgctcgtgagtttctacatgtgctctgatttctccatcttcattttgttctttacagaaagaaaatgacaacttcaacatttccaaaaaagacattgaaattactctcttccatggggaaaatgggcaattaaattgcagttttgaaaatattactagaaatcaagatcttaccaccatcctttgcaaaattaaaggcatcaagactgcaagcaccattgccaactcttctaagaaagttcgggtaagtgacctggcagtcccacctgctgtctttacctgatttttgtgataattccttggctaaaccagaggccagaatggaatctttcatggatcttcagatcctcactttaaatagaagataaacaaagctggtactgcgagcccaagcaaaatagctccaaaatagctggctgaatccatccctgtgcctgttcgaacgtcaaagcgttggacacaccattgtctataatcctaatgagtcttgatagcttttgttctagccacacatttatacagtaggatcggcaagcaaaatctctagacccattgacaaatgagctgtcactcttttctcaaatgcggaggtgacatgtcttagcagaaacccaaaacaaacaagggcctcttcagcacactctgggtagcattagaatcagatggagaccagataatctctgggtcatgggctgcttccttcaccatgaagtcatactttctgcgattaatcttttcccagatatgtttgggggacggatcactgctatatttatatcccataataaagatgtgagaccactgagaagggaaacacattagaagtcaccctttatagtattcatgccgtatgaggctctgtacagcctatataaattcttcttgatctatcatcataaataattggataaaagacaatgcaaaagaacttcagactggaaggcaacaacaaaaatgtgttcatgtcccactggcaccagttaatagctctgtggccttaggtaaatcacttgagtttcctgagcctctcttagtccatctgtatgataaatggggttaataataagttttatttgtttttttagacagagtctcactttgttacccaggcaggagtacagtggcacgatcttggcttacagcaacctccgcttcccagttttaagcaattctcatgcctcagtcacccaagtagctgggattacaggtgcgcaccaccacacctggctagttttttctatttttagtagagacggagtttcactgtgttgggctggctggtcccaaactccttgcctcaagtgatctgcctgcctcggcctcccaaagtgctggcattacaggtgtgagctaccgcgcccagccaatagtaagttttaagtcaggaataacaactaggctgggagagacaactcaagcctataatgccagcactttgggaagccaaagcaggaggatcacttgagcctctagaagtctgggcaacacagtaagaccctgtctcaaaaaaaaataaggaacaacaactcaactcaccagtgttcccacctttcctgttagttgagaagagcaaatgctaacattcttcatcattcatgacatagctcctgagagcctacgctgtgatggggacagacagagaataaaacagacaaaaacatctgcctttatggaggttccctaaagagacacagcgtgaagaatataaataaaaattgtgttacttggtggcagttgctatggagaaaaaaagcaccagtgtgggggggtgggggggtgggaacaggagcaggtaggggggccatgctgcaggttttgcaacggtgggcagaagaggcctgcttgtgaaagtgacatctgtataaggaggagtgggaacaagccatgggctatctggggtagaacgttctaggcagagggagcagagggagcagaggtcctgaggcaggaggctgcctggcatgtttgaagagcagcaaggaggccagtgtgactggagtggagggagcagagcagaggcttctgaggttagagagttcatggagacaacaggagatgattagaaccttgtggaccatggcaagggcttggcttgtgggctgcagaaggcatgggagagttttgaggagggcgccatgagctgacttattcagatgacgtcatgaatttagtcaggacagcctaccaagaggcactcccaacatcccatttcagagatgaggaaaaagaggactggatgtgcatacctaattcagggttccatagctgagaaacagagcaggtggcagagctggtatggagagcttcagctatccgggtccaaatccatcctccagctactgtgctcagatgcctccacgggggcagcatgagtccaaggatggaaacacgccttaatacttgtatgtacatcagtgaaataattaagcttcatgtagagtttttcccttgacaagtttcacaaaatataacccaaaaaaatgctaaaactggaaaaatccctcagggatgatctgatcagcactgccaatctggtttttgccacagaatgttttattcaaaataggatgccaggtacagtggctcacacctgtaatcccagcagtttgagaggctgaggtgggaggatcgcttgagttcaggagttcgagaccagactgggcaacatagtgagaccccgtctctacaaaaaatttaaaaattagccaggtgtggtggtgtgtaccgtagccccagctacttgggaggctgaggtgggaggatcacttgagcccatgatgagttcaaggctacagtgggctatgatcacaccactgcactccaacctgggcaacagagcaagactttgtctctaaaacaaaaacaaaataagcctgcctgtaaaaatgataaaaattgagtttcttccttagaataaagggcaggcaggggcttcttgcctacaggttactactgcctctttattgccctcactcctgcaacttaaaacccccagagcaaagagggccaaaattaagactctgagggtctagtccagcatgtgtcaactgacatttcaggaaactgaggcacagtgaatattctggatttgcccaaggacacatagctaatctgccacagaaatgagagttgaactcagatatcctacccagctcactgcttctttttgtattgtgaagccattttaggggggaaattatgtaaataaatacagtccccaactcaattgggtctaatgacattctttgtcccatcaggtcaagctgggaaacctggagctctacgtcgagcaggagtcagttccttccacatggtattttctgattgtgctccctgtcttgctagtgattgtcatttttggtaagtgccctgtttaattttgtcagagaaattattccctggggcctctcgccgggcaggcagactttcagctttcaggggctgtttgcttcaattaagtataaatgggtgaaagcccaaatcaaaactttgagaaacgaataataggtacacgctgagggctttctaaacatttcttttggccaggcgtggtggctgatgcctataatcccagcactttgggacactgaggcgggcggatcgccttgaggtcaggagttcaagaccagcctggccaacatggcaaaaccccgtctctactaaaaatacaaaaattagccgggcgtgatggcaggtgcctgtaatcccagctactcaggagactgaggtaggaagaattgcttgaacccgggaggcggaggttgcagtgagccgagatcacaccactgcactccagcctgggtgacagagcaagactccatctcaaaaacaaacaaacaaaaaacaaaatttttttttaaaggatgcttcattaatagaaggctggattacacagatggtatcttgggatttgagggatataatctactttgcttctccattccttcaaattgtggtgacaaatgttcatttatgtaattccccaagaacttctctgggattttgggctcccaggacttggttatttcatcttgaccaccccccaccacccatcaccccagcctcatttcagtcttgattttctgggcagaaccacactttagaagtgtggtcatgcctgggcacagtggcacacacctgtagttccaacactttgggaggccaaggagggaggacggcataagtccaggagtttgaggttacagtgagttatgatcgtgccactgcatgccagcctggacaacagaatgaggccctgtgtctaaaaagtaaatgattttttttaatagaagtgtgatctatgtcatctcttaaagtggtcccgggcccatccacacacagtgagcccatggtggttgctcattggccaaatctggtccaccaatatattttgttttgccgtgtagcattgtctaaaactattaagtagcttataacatttaaaaattagtgattcacatttggaaacgtctcttgaaaatgtgaaagatttggatcattggatcccaaatttccatagcatcagtttattagagctgagtagcagctacgccctagagagagggaatgtgctccctaggttttgaccacagtcgccaccactccatattgtctccacctaggccatttaactcatctatgtacctgatatctgtagccatttcgtttgtgactctggttctgagctgcttgtcatttgaagtctattttctctcatccttctttgaaaaaggaactcttatccaccaacaaatagcactttggctgggcccggtggctcatgcctgtaatcccagcactttgggaggctgaggcgggtggatcacgaggtcagcagatcgagaccatcctgaccaacatggtgaaaccctgtctctactaaaaatacaaaaattagctgagtgtggtggcacgtgcctgtaatcccagctactcaggaggctgaggcaggaaaatcatttgaacccgggagctggaggttgcagtgagccgagatcgtgccactgcactcccgcctggccacagaacaagactccgtctcagaaaaaaaaaaaaaaaaaaaaaaaaaaagcactttgtatttcctgatttaacataggtattgactttctgaaatttgacagctagtacaggcagttgccagtgtctccttctatacactcatttattcactcattcatccctgcatctatttaccttatgttcattgagcacctgttatgttgctgataactgtgcaagtctctggagctagaaaaaaatgagcctttgcgtgcatgagccagtgttgctcaaactgaggcctgaggaacagtggtcccaagtgactgtcctggaaaaaggggttccatggtcaagtaagtttgggaatcactacatcatactccaccctttcttagacatgcacaatgcatgttattaagactgttgactttatgaagtagtccagtgaagagccatatttgtttcctccagcattattggtagcagagcccgtctattatgtaatttcttttttttttttgagaaagggtctcacttttttgcccaggctgagtgcagtggcacgatcacggctcactgcagccttgacctcctgggctcaagtggtcctcccacctcggcctcccaagtagctgggactccaggcatgcaccatcgcacccatctaattttctatttttttgtagagacagaaaaatatctttctctgttgcccaggctgatctcaaacccctagcctcaaggcatgctcccacctcagcctctcaaagagctggaattacagacgtaagcccccgcacctggctgtaatttctataaggaggagaagcttcctagaataacagtggttgattgttgaatacctatacttttttaaacaatacattcttaatgctttttgtgagttacttcttataatcctcccagcatcacagtgagataggcactcttacagagaaggcagccaggcacagagatgctgaggaacttaacccaggtcacatagctagtaaatggcagagcaaggacatgaacccaagcaccaaactgggttggtttatggcctctgcagcacagttagaagcaatatggaggtatgggagttccttgtggctcgctcatcatgtcaccccattagctctatgcaggtttggcccatgtagccaactgtggatctgcggttcctttctacgtttgcagcacaactttatttctccagggatgcttacaaacattcaaaaacaatggaacaatgcaagtggctgcagctgtggggaagaaacttggcttgtttcattacgtttcagccaactgggatctttggttacaagtgaaggttatttgatttagctttcacttgtaaaatgagtaaggttttggtttttttctgctgcattttggcatcttcctcttcagagtgacccctcactgggaaattttcttataagatccagctttttaatgctattttctagtttcattctagctcctgctctctgtccctatctgttttgtttttgtttttgtttttaagaactgtaaagattgctatttgttttcatttttggtttttgagttaccatgtccctctgatgcagcatctctgtctcttagcggccgtgggggtgaccaggcacaaatcgaaggagctgagtcgcaaacagagtcaacaactagaattgctggaaagcgagctccggaaagagatacgtgacggtaggctccaaaattgtgtttgtagaaaaacaagccttttatatttatacttttatttttttacccttacatagagatggccacagtaatgagaactgtttgtataatagaaggcaacggaagggcagggcctgggcctggctttgtgttttatttcagctcttctctgcagccaaccaagtcattatctattgtttcttctttaatgaaaaccaaggtcatactctgtgttagacaaaacagcagaagatcctatccattgtttgttgagttaaaatattgctcttgggattctgttttgcaggctttgctgagctgcagatggataaattggatgtggttgatagttttggaactgttcccttccttgactacaaacattttgctctgagaactttcttccctgaggtaaaagagcattgatcatattccgaaggttgagtcttgaataataatgaaggtgcttgttgctgttgtcaaaacgagtgtttgcttccaaggcagctataatgtgcttggtacaaaaataatggcttaagtttgagcagagcagggaggagggtaattattaattgcattgattagggtataaaacagtgatgggtcactggtgattattctttgcccagtaacaaaaacctaggagggacagaagctcagagtgatgatttttgctttcttttactctcaatgtagaactgaatgtgtagctgggaagtgagctagtttatttaaaaatcaataaattgtgagctagccaatttgttgtgtttatctgcatgacttacattgcagtgactagattattcactattacttctcaattggaaaggaaaaatactactggtcaaaagggaggaaagtagacatggatggaattggagttgaaaacaggcatttttagccatgtagagttcttatggttctctttggtagtttttctttagctggtcagtttgtattgtcctcatttagtagacgtagatgcacgaactgattaattcatttgttctagggctctgaggagtcgtctacttaaccttttgggttgctggtcttacctatgttctcacgcctccattttctcacccactcactcagccttctccatttaccctcccaagtctttggcgaggtacactcatcctgcgtatcatcactgccatgtcctgataccccagctctgccatattgcccttcttttttgcggtatgatgaccacatagaggcccaacctcttaaacacatcaataccaatgatcacatttcaatctagacttctaagcaacggctgaaatctctccaggccaaaggagagtttgtatcaccttaccagaagcttctccggaacaattggccagaagcctagagttcagaaacccagacacatgcagtaagcaatttccagtttctctataatttagaagaggacaccatgatatgtaatgcggggtctggaggttggaatgcctccataaaacacctgccatattttttggtccaagccttagtgttataaatcaagaaggctgtaaataagacttcagctttttgtgctggtgaagtttgtttcctttaacttatcctccaagagtaccgaggcaccgagatctaccatttgccacctcatccatttctatggcagaacaccgcctggggaaaggaattcgattccccgaatcaggatgactgtgtggggcttctgcaaaggttgcatcacgagtcctatttctgagctatctgagatccccattaagaatttaaaagcaataaaataacggagatttttgactatcaacatgaatgctgtgtgggcttttacagttaatgattgcccttgagtgctgaataatctgtggcctgaaaaaagaaatgttcttatcttctaaatttggtaatcaagaacaagatagagtaatgaatgtaaaggaacactgttgcaagttgagtgtttccaaaaaaaaaaaaaaaaaaaagatcccaggaacaatgctaccttattttaggagaagagagatagttgcaaaggaggcaaactgatttaactcagtgttgtgtataatcttgaaaaacaactgggaaagtcataaaaattgaagtcagaagttgtttaaaggagagaacccaggaaaaaacatgcataaatttgtcagaaccctttcaagaagacctaagtcaaaactgattttataataattaagaaaagatagaacagggaaacagatcgtaagaagacaatgccacttaaatgcattccaggctgcagataagtcctggtattaattaggctctttatggattgatcagaagccgaatcctctaggcctggaggttgggggctgtgggggtaggatttgggtgttcagcacctacaaaaaagcaacaggcaaaatccagaggagattgtaggttctcaaaggaggccagggttctttgctctgcctgtcggttttggcttttaaagccttgctttttattttattgactcttctttgctttgcataaagtaggagaagaaataagggtaggcagaggatctaagctgaagaaaagggaaatttgaatgaaaggaggaagcagccttaaaactcagagagccacgggtccaggcgcggtggctcaagcctgtaatcccagcactttgggaggccgaggcgggtggatcacttgaggtcaggagttagggaccagcctggccaacatggtgaaaccccgtctgtactaaaaatacacaattagccaggcatggtggcgtgcacctgtaatcccagctactcgggaggctgaggcagagaattgcttgaacccgagatcaagaccatcctggctaacacagtgaaaccccgtctctactaaaaatacaaaaaaattagccaggcatggtggcgggcgcctgtagtcccagctactcgggaggctgaggcaggagaatggtgtgaacctgggaggcggagcttgcagtgagccgagatagcgccacactgcactccagcctgggcgacagagcgagactctgtctcaaaaaaaataataaataaataaaaagaattgcttgaacctgggaggcggaggttgcagtgagccgagatcacgccactgcactccagcctgggcgacagagggagattccgtctcaaaaaaaaataaagaattgcttgaacccgggaggcagaggttgccgtgagccgagatcgcgccactgcactcctgcccgggcgacagagcaagactccgtctcaaaaaaacaaaacaaacaaaaaaacacacagagagaaccagggcggcacttccgtatttacgattaagaatcaacctgtttctcctgtctatttacatgaagttggttcagcagaaaaatattaagaaccagaaaatgcaaacctagggtctgggggtttttttggtttgtttttttggggcttttttgctttttactaggggaggatatggccaaaatagtttcaggtcttttgcttgggcttgcagatttgaaactatgaagcaaaattctctacagaagaaatttacttcacaagatataaaattagctcaaagtttctattattatcaaaaaagaagaaaaacttgaatgttttgagtttagagtctcattctgtggacttaaagtattgcttaacatacttttaaagtttaaccattgatttttaataagattgatgatacactataaaccctttttatattccagagctacctagcatttagaaaccagtggggtgatagcattgtggtctagtttgctataaattaggaataaaaccagtaatgataactgacacagggcacttactctgcacccattttattttcacactaaacctctgaggtgggaaccattactgtccccatttcagagatgaggcaagtcagacacagagaggttaggtaacacatcccacgtcatgtgaccagtatgtgattaaaaccaggactggaacccaagtagtttggtccagattctatgcttttaactaccccctgtctttcaatatcattgtgtattgaaacagtagatgctacttaggtaagacttgtaaaacttaacaacgtaatttagtctttatctttagaaggtaaattgcttgaagaggggtctgatatttgcataatcttcatcaatgaccccttctttaactcttaaatcacttcttctaaaacgtgggatgataccttcatctaccaaacctggaactaatgccatgataattattattcttagaggctttcggaattcagtggcgtttcttgaaagctgaataattatttattatgtattagagaatacgcagccaccataaacccaggggcgcttcagattagcaaatagtgtctctactttattaaaacggacttgggtattataacaaaaatacactcttcatttcctttggatgttatgaataataaaagtgtctccttcctctcagtcaggtggcttcacccacatcttcactgaagatatgcatgtaagtctctacgttttcatttttagcccagtgactgcctgatgttcatagtgttatcatcatcactatcatctctattattattactttgaatttttattgtgggttttttttggatcatgaattcaatattgaataattcattgtcttggaaaacccattgtgggtctactttctaactttaaacttatatatgattttgtattatactatatatttttttctttttatcagaacagagacgccaacgacaagaatgaaagtctcacagctttggatgccctaatctgtaataaaagctttcttgttactgtcatccacacccttgaaaagcagaagaacttttctgtgaaggacaggtattagtccattctttgatgttttaaaagcctttaagaaaaaatcaggccgggcatggtggctcatggctgtaatcccagcattttgggaggccaaggcaggcaatcacttgaggccaggagttcaagaccagcctgaccaacacagcaaaaccttgtctctacaaaaaaaaaaaaaaagagagagaaatcaaacctgagtcccatattttatttccaaaccactatctgaacttggtatcttgagaacatgcacttttccaaaggctatttgattgggagtttatgcagccttctctccattttagatcataccaccccaacacaatttttttgttgttgttgttggagtctcactctgtggcccaggctgaagtgtgtgatcataggtcactgcagcctcatcctcctgggctcaagctaccctcctgcctcagcctccccaagtagctggaactacaggtgcatgccaccacacccagctaatgttttgttgttgttgtagtagagatggggtcttgctatattgcccaggctggtctcaaactcctgacctcaggtgatctgcctgctttagactcctaaagtgctgggattataggcgtgaaccaccatgcccggcccataaattcttaataaaaaaagcagaagtgttaatttttatttttaaaacatcccgaaactttggaagactcacatcttgttaccactctagtttaaatgctgaaaacacagaaaatgttctagagatagaagtggttagaatctaaacattaaaaaaaaaaaaaaaaaagctcccaacccaacaggccagctccctgccctgccagtgagcttccatggaaactcccatgggtgtccagctaggcctgcagccaatggttcacccagctctctttttcaacaggtgtctgtttgcctccttcctaaccattgcactgcaaaccaagctggtctacctgaccagcatcctagaggtgctgaccagggacttgatggaacagtgtagtaacatgcagccgaaactcatgctgagacgcacggagtccgtcgtcgaaaaactcctcacaaactggatgtccgtctgcctttctggatttctccgggtaagtgtcacatccctcagcaatgtcagaggtaagacaataggcagttatttttagcggactctgatgcctttgccaggataaatcctgaatgctcgatggtgtcagcacttaaccatgtttcgtcttggtcctgacccagaacagagagagggaaagtaaacattgtttttgctgcaactggcctatgcaaatgtaattcatttagaatttcgtcaggtgagacttttcaggtgagtttaccttctcacgtcaattcacacccagagcccagtcagcccatttaagaaaatgtactgagaaaagggaatatttcaaacaccagagaacaaactgtttcaggccctctgaagcattgtagaaatacccgttgcctaccaatatgctgtaagctaattgcagtcaattcctaccagtcattccgcattaaagcagctctccaaagagctgcctccccctggagtttgctttgttggagttactgtgtgcatgtggttgtcactaattgaactttaaaatcttttcaaatgcaaactttctatagattccagtggagaagagggtgggccctaaagtctgctacttgatctgaatctagacttcaccacttacttggttttataaactagagaattggaagaagattttaggactattttgaagtacagatgagaaaacataggcaattgcttagccctaaggaagcctccataaatgttggccgttacgattataaaatattaatgtgaaaataagggtgtcctgttgaactcgatcttcacccagccctctgaggcccctggtacagaagattcttatcctttaattttaccagccatccagatttcagcaaaactgcataattgtgtatttgtagctagttccgaaatctaattaaactttgaataagatacactgctatgccacaggttttaacagtgctacttaagtttagatccaacagcagtgctttaaatagactgtgcttagtttaatgtttaatgcaatcttacaagtagatgcacaacaattttttttttaatttctcaccaacccctccctctccctaaggcaatacccatttattaagattaatgaaatctgccttcttttctgtttacttggtataaatcatcggaggctttggggagatgttgagccagttatttctgggacgaatatttttttgtttcccactgtctttgctttagccacaacagctgctagatggaggcaccaggactctcacccagttccctggtcttggtcttcaaaggccaactcctgccccaccacagtctcactggatcagaagctccggaagtggagcccagtaatccatgattttcacaagtccctgggatagtagagagagcaccacactaggggtcttggttagaagcagcaggtctgggctctggaaccatctcagccccggtcagctgtgtgtccctgggcatggctttttccatctgggcatctgttttcaatccaccaaatgacaggcgtgtgtgggcgttgcctttaaatccctttccagctctttctactggatcttgtgattcttaactctgagctttcaagggctgctcttgggcattagaggggtgagatgttcagaaaatctgggctgcgagcccaaacagcctccttgagcaaagcattctgggtcaagacttcacagtgctgattcaagagcgtctcgagcactctgagtggtgagggggcggctcggctcgccaggaggaagtggcatccagccagtcggcgatactttcactttcagtggaataattcccgctggtgcaggggtctgatgtccctccaccaggtgctcaagggggtctgggacaccgacagccctagtcctcctgtcctaccccacagacgtttagtgggtgacagtagctccgtgaccgccaggtaactttcccttccaagacaccaaggatttgtgggtaaaataataataccatttattgaatgtgccagacagcatgctaagagctttacctatcttttctcatttcatccccttaagggtcctgtgagctaagtgtcttcatgaccattttgtatatgggggaactggaacacagaagagctgtgactctccccagatctcactgctactgtgggacagcaccagggtccgagagctcttagccaccgccctgtgccctgaaaagatggaatctgccctggtctgttaaagtgtcgaagcctggcccctgggggaggggaatcacgtacgcagcggctgtggctcgcctaaaagttgtgtttagtggtgacagagaaacctcatggccctgtgattccccaaatcagccacacatcagaatcctcctcccccaccgcctccccgcccccggccccgggaaggtaatgaaaactacagatacccaggcctcattcttcagagagatggcagctctgtaggtctagagtggagctcaggcatctgaatgcttaacaagagcccgcaagggattctggtgattagccagggttagacccaggagcatgggcagagtgtagggccagatgttacttagctcagtctagctactctccagaaagttctggagaattcctgaccacaggcctcctgagtcaagacctgtcccttcacacagcccccgagagcccacctggccccctgactccaacccctgcgggagtacacagcccctatccaagggttctcagcctcccttctgatctgtgctggaggaaaagaggttctaagttttgtggtcagggcattacttggggtgggggaggtgggcggtggagggaaagagaagagaagggtgaggttgtaaaccactaaataaaggaagtttctcatgagaattaaatgtcatgcactagtcctgctgccctccctaccttggaaatttctgaacttccacttctgccctgcactgaagaggagactcaaggaggtatcacagcagggatagaagctgcagggtggcaggaggtggcaagaggaagcccggggactggggagggcagatattcctgcagcaagtataaaggaagggacagggttggggtgggatgctgagagacttaagatgtcttaggtaacttgcctgcgcaagggaaagcaggtgagacccagtggaatcctcctttcccagctggacgtatcgcttgtcaagcttgactcttaactggcgcttcgagccccagccacgtggctggcctttcgtcatcactaaggcactttgacttcccagccacggttcttcctccaccacagaggcctaatgtccattgattacggaaggttcgttatttagcaaatactctacagctgacccagggctaagtgccttgggaggatgccgtggaaacagaacacaccgcctcccacttgaggtgctcagagtcctttggaatgcagacatccgtgtctgcgaatgtgagccatttccatcacagcaggggaggcagccccacccccagccaggaaaaatgcatgtggcttaaatttgtagaaagagccaatcgggatgggccgagtgtttggagaaaaaccttagaggaaatggaattggctctggttcagggaagaagatggagtccctctggcccagcaccggaaaacatgtccaggtgggactgtgcagtgtgtgtctgggaactgcccgggccgggcctggcctggcccatggagaggagataaggctgcaaactgttgaacggcaggctgcttccttcgagaagtgctgttaacaccaaaaaacattgtatttggcaaatgtataaaatgttcttacatttatccttgttactaaggatacttgtgcatttttttaaatgtcgtttatttctggcttgctaaagggtgattaaatacgaatgtaaacaaaggtacactctccacatctaactgttcctaggcattaacccactgatgagcattagtctgccatatgtaagtttaaacataaaataacaaggtatactgtgggtactgcacgtcgctgtgaatgtgcacgcgtgcgcgtgtgcagatgtgcattcgcgatggagagaggaggcggttttctgagttttgcatccaatcccaagtggagcaacgtgtattttcttgggcgtttcatgttgagtgttagaaaaccctgtctcctgccttactgctgtaaacagaaactttaattctttggaaagtacagtggattccacagaaagctaactgtcacttttgtgtcttttccaaggagactgtcggagagcccttctatttgctggtgacgactctgaaccagaaaattaacaagggtcccgtggatgtaatcacttgcaaagccctgtacacacttaatgaagactggctgttgtggcaggttccggaattcagtactgtggtatgttttcaataaagctcccagccagactcccaaataaatctggcggggaattagagggtgaggtgggtcatttacaatgaaacggtatcatctctactgcgggaggccctgtgtgtttagttaattaaaaacagtagttgataaaactgttaacacgtgttcacataatagattttaattactgagattgggggagaaaatattgtaatgatgcctggggtactcatcaatttccaaagattttaatatcaggattgcttataactttcagtgtcgtcaaaggaaatgcaaagtactccctattcagcacttataattgcaatcagaatttctcaaatggctctgctctgggaagacaatgtgtgaagatatatttcaatcaaattgaggccgtcttattttagaatgataacacaagacaaattccaccacgttccccatgcaacgtgacgccctttattttcatggattagttacaaatgtttggtgtcatgcacttaatgtactgtgatctcatagatatttttagaggaacgctgtaaatcactacaggaagatgattgcctagctgctggagggtttcacccgcttgagaacttctttctaattcatccccaccgcacccaccccatgctcttcctaaagaaagaaagaaagcccagtttggggcacatttgggaatttcagagagggagccaagcagggaaggtaactttagaattaggaattttctatgcttttctgttagtagagacttggagaagagattgctgtgttttggtttgatctttagctttatgaagattctgggcttcttcacgatctcgttagtggaggaggaaaagattacagtggggtttgggaattgctcattaagagagctgagtcttctgtggctttgctctggatggtggggactgcagtgtcatctgggaagaattcattccctaattggagaaggcaccactttgccgtggagcgtgttatggttatgtcctctggtgggagaatagtccgtaggtcagctgtttcaagttttctgccactgccagatgcggctcacttctccatcaaagatggcaccatgcacagctgccatccgagagcgggaagctgagctgaaagtcaacacttctcagcgttctgaattgtatcaatacacccatccacatctgagaggccggagagtgggctgcattggttctcaaacttgagcatctagcagaatcgcccagaaagctcactaaacaccagtcgctaggcagcatgctggagtttccgatgcagtaaatccaggctgtggcctgagaattcacttccctaaccagcttcctgatgctgcgggtgctgcttaacaactgttggtagagtggttaacagcatggactctggggccagacattttggaatcctgcctctgccactggttagctgtgtaatgttgggcaagtttctaaacctctctatgcctcattctcctcacatgtgaaatggaaatgatggtcatggttcctacccatctcatgaggtgttttgaggattaagagtcagtattataaaaagcacttagaacattgccaggcatgtgagtgctacctaaaactttattccatttgatccagatctcattgaacccttgtttaaaatgcaggtgcaaatataccagtgcccgggctttccctcgggactgactgaatcagaatctctggggagggagcccaggcgtggatgtattttgtaaaccttccagatatctctgatgtgtgttcagcctggacaccactgggtatcttggagaacaagagacaaactttgcacagggcctgttgactcacctttcgctgatcctgggcttgttattcctaacctagaagatgttcatgcctttactttaagacgttttagaagccccaaaggtctccaaagagaaatatttgcaaatgattatagtcgggaatcctccagcatttcagtcatgagacaacaccggacccaaacaggaaagacaggaaaggagaagatgggttggaatcaggaagaggtcagatgtctgaggcaacttttgaggttttgaagcctttttaatgctttacatctgaacgtgttttctccctttcatttcgaaacattatttatttcacagtcaattaagaccatgtgtttctgatttgttaacactcgactcatcatcataatgttacttgatgctgaaggaattcatgtcgactcttgaaatttttttttctttatagcccctggggaaaagggtaatggaaaatcatgatttcagaaatccacataaatcttccttttcaaattcagatttgccggtacataagatttgagccttgaaaaggaatgggccacttgtttttaggggccttgcctttaaaaatgattgttagtgcctcttatggggcctggcccagcccccctttcatggttggcagttgtacgagaagctgcagagaaggcacatgatccgttctatgcttgtgtgacaaactgttagcagaaggtcaatataaaaaatttaagtttttcatttcctttcaggcatttcccccagcctgaaccaccatatttctaattttctttcttcctcccttccctcctccccttctttttcacttcccccacctacccctcccaagcatgtacacccagccattttaggacttgatttcccaaatttgcctgaggtggtttatgtaattgaaaaccaaggtgcggtgaacaaactgattctgtgtgtccttgtgtgctggggaggtgggaggttgggggcagattctttcaaggaaaggaaagtcggaaatcaagagcatcctcacgaaccacttgaaatgacagaacctggtgccaaggcagggacacgtttggaaaaaaggcccccacactcgtgttcagctaaatgctcagaagcacagcacctcatatagcaatctaaaagttagctttcacacctctcagatgaggatgtgttctccctgaggtgtgggggattttctagaacataaaggcatcttgccaatttcttatacatgaaatcatgacactaacaaagaggccctgggaagtaatgttctcttcttgcatattgagaagaaaattcctctgtcttgccaaaaatccaagcaaagtcccctagagccatacttcctccaggaccataagaaaccatccttctctatcaagcattccaggctggtgtttaatgaggcaacagtgagacagaatgccctgatatctgcatcctccctaatgtcagcaccaggggtagggctgtgcacacacaggactttagtctttccttaatatctaggaattcagatcagacagctggaagagaataagaccttttttttttttttttttttttttaatttaaggaataccactctagtgcaggctggagtgcagtggcgcagtcttggctcactgcaacctccgcctctggggttcaagcgattctcctgcctcagcctcccaaatacctgggattataggcacctgccatcatgccaggctaatgcttgtatttttagtagaaacgggttttcgccgtgttggctagcctggtcttgaactcctggcctcaagtgatccacctgccttgtcctcccgaagtgctgggattacaggtgtgagcaactgcatccggccgataataagacctattgctctgctgggtttttttcccctttgcaaaattttgaacatgtttgattttgttgatggagtatctcagactcactcagcttacgttttgtcaagagtggaactttggaggagttagtgaaagtttgaggatttcacatgggagaagggacatttgcttcactttcaggaagagatgagaaaaaccaataactcgtagcaagcgtgctgaattagcaagagaaggttgacttgtaatcaaagttaagtgtgaaatggttttttgaactcttagaaaacgagcttgccaatctgctgtatctgagagagagcatcttggcaccctggaaaactgttccgacaaaaatattattgccttcattctcctatctataagaaagttttcaagattattagaaattcttgaaaaagcacaagtacatgcctgcagaaatattaatgcctccaatttgatttattgaaggtttatgccagcctaccccagtctgtctctttctctagcagttaccattttgggacaattacgtttaataaaatatctcatatacaacagagccctaggtgtctccaccaggagtttcttactagtatacttcctttaacagtgctctgcctaccagtgctggctgcttctgttccatttagtttgtccttgcagaagatccattagccccgtaattaaacaacccactgtcccgattaagtcattctctgttacttcaattacattccattgttcattaaatcctgatgtttgcacttcagcaatcttgtttttaatactcctaccatttgtggagaaacagtgaagttaattaacaattcttgagctttttatttttctctctaccatagtgcaaatcatttccattatgacttgcaatagtactgaaaccattactaacttcatagttagtgttctgagcttcctgatcaaagagtgaaaccactttttacaatcattttaggtaagtcattccctcgttgatggcaagtcatggaaaatgaaaaattaacatgtaatgggtgctttaaatgactttcctcttcatacactttcttctcatgcctgtaatcttggaattagaaaataatttagttatctaaatataaaagtatttactttttttctttatagctcaaatgtgactctattatgttattgttaggatcattatttatatttgtacccctcagagaatggtaaattttatcacaagtcatggcggagatagaaagcattttccagatttgtcttgttgctattgtcaaagttagcattccatttgaaggtactgttatctagagcagggaccagcaaacaacagcctgtgggccaaatgtggcccctctgcctatttttataaagttctattggaacacctgttcatttccttattgtctatagctgctttcctgctacagtgcagagtggagtagttgtcacagagatcatatgagttttaagtcttaaatactttctggccctttgcagaaagtttgttggcctttaatctagagcttgacatagtagagaataggaaccagaatcctccctcccacaaacccacaaacaggttggcctctttcctccccttctgggacacagcaatggaaatgccttgccactatttacaagtctgaaactcatggggctctttgccaacacacaacacccacccccacccccaaccctgcacccgcaaatactgtgaatactaaaatcagttatcttgggctaaatcagacagctcttcatacttgattctaggatggacaaaacgttagcaaatgctagcaagtatagaaaaattggtgagagaaacctaaatttgagaaaattatctccattacttttttttttttttaaatggaaaaaggctctcgttaccctgtcctccaccccttactcttctgttagagtagcagatcccttgatccaggaagctgtgatttatggatctttgtggggaaaggaaaaggggagcagagtgaagaggggaggctggatgggcaagcgcagctcaaaggggaacgtcaggcagaatgtcccagggctgctgactctggcttggaaagaagcttagatcagaagtttccctcagacttgcacttctaactggcctcatgctgcttctacggaacttctgaaactgaattttctttcttgtttcttctctctttaattcaggttggtataagaactaggcttttctcttgactttcattcggccctgaaataaaattagaaatatattttataggttttatttaatgaaagcaattattgctccaaggccttttatgataaagttgccagtttgtaataaattatcttacagttactttctaggcattataaggtatcacagaaaggaggcagcaacgttcctgcttttattagccaagaatatggttgaggagacagtgaggtagccagatcatcttcccatgtgggaaaagacctgttcccctgcccttgattcatcctgccagccccctgcagccttatcctctctgcctcctcaatacccaaaaccaccaaatcatgtgacgggacgatgggtaaaaccggtagtgaaaggggaatgcagttacatgttcccaggccgtgtgcagaagaggtggggtttggagtctgatagtcttgggtttgaatctgggctcagccactttactctgggcaagtctctcaacctctcaaaacctgtttcctcttctgtaaacaggcaatgaccaaaacctgccctcgcatatttgtggtgaggtcagaaaataatacatgtaccacgtctagccatctttcctggtgtgaagtaggtgctcattcttttttgattcagttttccttgtctgaggtgtgcttttctcttgtctcctgtaagcttcactaagcagaaagtgtcccgtcagtattctttttggttggttatttattgatgatgtgggatgtgggggagttgattagctgattccatcatcatgaaaagcatttcttgggtgcctgtgtgcttatgttcttgttaaaaatgttacatatgaccgctgtgatggggtgtttacaacctgtggcagacagtatcccattgggcagatgtgaacaggagacgaccgtgataacctgtgagaggctgatggctgacatgctacaaaggggccaggcctttccagcctggccctcttcccgggccttctggaccatacattttccaatagtcttttctttctcataaccctccttggtaataggcatcattcccaaatcaatcaggatgcagttcagttgtacagaacagagacccaagatgtctgtggcttcagcaacagagaagctgagttctctccctggtggcattctgggtgggcagtgcagggctggtagagcagctgctcctctcttgtcctcatattctaagtgtctgctcaccccagcctcattccccatcccagccagcaggatgtaagcagggctgtagaaaggagggcagatggtcaccagccatcttttaaggaagtgccacataacatatccacttaatgtcatcggccaggacttagtcataaccagaacatgtcctgactctgagctgcgaagccaagaggccagctctgggtcaccatctcccagtgcctcctggccctgccatcctagtcacaagatggctgccaccgctccaagcactactctcccttttgttcggatcgaagacttcccactgggcatggtggctcacacctgtaatcccagcactttggaggccaaggtgggaggatcatttgagcccactgaatctggagcatactggccacacctggcagcagcagaggctgggaaatgtcacctttattctgggtgaacagaagctctgtaaaaatgtccttgggtggcaccggaggcacagggtgctccagattcagtgggttctgtggggttcaatatcaagctggggtgaggaggtcaagcctcctctaccagatcgcctatgtccagcctgtctcctgggagggcattcattgaggccttcaagcagaggggaactgcccttgggaggctcatcaccttggctggcctcttcgcttcgcagcccagagtcaggacacgtcctagttatgactcccaccggctccatgattttggacatgcttctaaatctctctggtctcggtttcctcatccattaaatgaggctaataatggcacctacttcatagagcagttgtgaggattgaatgaacctataattgcattcccagtacgtgataagcactcaataaatgctggtccttattattacaaatctagaaccatattcttttctttaccatatttttttcctatgaatagtacagggactctctttcaggtggcaggaggtggttttgggaggcaggcctgggctacaagtcctccacccatacttccacccaaagaaggtgggatttttttctgtagacttcctgacctgatagcctgagtgagtgattgaagcttcctgctcaccagtctaattagagactggaagccaagtgtctccatggtctaggggcctccctcatgaactacagctctttgcgacccaattcaaatgctgcctcctccatgcagccttccttgatttctctgtttgaaaaccccctgccgacctaaaagaggtacctctctaaatccctaaaatgctccgtctgtacctcccacattctacctggcattagaatgtgttgtatatgccccacagttcttctactagtctgctagtacttcccaagcaggatgagtacaggttctgatttgtatcacctacagtgccctgcacacaataggtgcaaagtaaatggtcatcaatagacgaatctacctcagcatccacaaaatgagctctggcagtttggcacatgcagctataagtaagagaaaattgaactaaggatgcctgaaatagtaagagcatgacttgcctcttagagcagaaagtctggagggaaggagctccaagccggtccctacattccgtggtgtcagagctctgcgtcaccatctcccagtacctcctggccctgccatcctagtcacaagatggctgccaccgctccaagcgctactcccccttttgtttggatagaagacttccaacagggtgtggtggctcacacctgtaatcccagcactttgggaagccaaggtgggaggatcacttgagctcaggagttcaagactagcctgggcaacacagcaagaccctgtctctaaaaaaaaaaaaaaaaaaaaaaaaaaaaaaaatttagccaagcatggcagtgtgcacctgtagtctctgctatgtgggaggctgaggtgggaggattgcctgagcctgggaggtcgaggctgcagtaagccatgatcactgcacttcagcctgggcaacagagtgagaccctgtctattaaaaaagaaagaaagaaaacccttggttttatgtgttggccagagctgggttacatgaccagtccctggtgaaagagaagggagttgctgctgatcatgcctcccaacccaggctggacccactgctgtgcagacctggcctttgttagcagaggagggatggctgctggttggacgacaaaccagatctgccaccgcagcttactgacactttcctgccaaggaaataggaagaggcagggcagtccctctaaacagagggcagatttctggggaagggaccagtgtacatttcacagctctttagcctttcatgggtattttctgggtattatgccatcccatcgatttggaccatgcttactttacaaaacattcttgtacttccaaaggcaggatcaccgagtgtttaagaacacggagcttgagtacccggttctaccatcttcttgctggctgaccttgtgccatttatttaacctctctgtgcctcagtttctcatctgccacaaggggatgagtaaaagaatctacctcacagggttgtttctgagatttacatatacaaatacacacacgtcatttaaaacagtgtctggcacctataaagcactccttaatttgctattattatgtgtcattatttagtgatcctgtcactcctttgagataggaacagtgaggattttaaggctcagcgaagttagacgacttccctacattccctcagctggtgagcagcagagaatgggagggtccaggtggcccggtgctgggcctggaactcagggccctgacccccactgtcctccctactcagaatcctctgtggacacttgctgagggtgatagtcactgatgggtgactgttgtcccacagatgatgcttttgtctctgaaatttatcatgaattatctgagaacaaggactatgtcataacatctctctgacatcccagccctaatactaaatagggcaggagaacatgctggttaaatgggctttggtgggagtgtgggagccggagagatggcgcttccatcgaggtgtctcccccgatggggtacagtggctgagggcagacgctgtgatgtcacgctgtctgacatggcacaggcatctgctccccatcacagagcagaggcccgcgtgcactttcccagcctgggggtggaggtgttaagaggctgaccccaagggccttgactgtacttacgccttaagaaactgctgtttggccgggcgcggtggctcacgcctgtaatcccagcactttgggaggccgaggcgggcggatcacgaggtcaggagatcgagaccatcccggctaaaacggtgaaaccccgtctctactaaaaaaatacaaaaaattagccgggcgtagtggcgggcgcctgtagtcccagctacttgggaggctgaggcaggagaatggcgtgaacccgggaggcggagcttgcagtgagccgagatcccgccactgcactccagcctgggcgacagagcgagactccgtctcaaaaaaaaaaaaaaaaaaaaaaaaaaagaaactgctgtttgagcactaagtgttagcagcatgaaaaatgaacacatatcaatttatgtctgaatttactctcagaattccctgtggactctgtaaaatgccattttacctcttttccacccatccagctgtggaggcagtggcagatttacattattttacatccagttaagggtgttttttcttttggttatgtttttaaaaagaacatttattgcccataaaaaagtgtttttgttaaagacaatagtgcctttaggtagtaatagaatgctgtttcacaaatatttataaaactattaaacaagctgagattgctgaagctccgattaaaaggtgcctcccattcatctttccctttagaaactgaagtagcttaactgcaattacccgccaccatgagaagatcaccttgcagagaaataaggcaagaccccaacaagatcgtaggtggtggcaccagcattgaccccttcacacccacccctcccactggtgtggggaatttagcttaggacattgcttacagcctgagctaagccagggtttctggagggtcaggagggctcctgggctataggtggaaccagaaggagggagggagggcgggtggtaaagcggggatggcatagccgaggggtttgtggcaccaattgtgcagttaggcaaatctggcttcaattcctggttctgccactggtgagctgttcctggagcaagttactcagcccctctgtgcctcagttccctcactctacaacagggatgggaataataatccaggaaacatttctagaaaagggaggtgaggagagggctcgggtgtgaggcttcacatgttggttccttctaggcactctgcccaccagctccctgccttctctcctgtctggtattttttgtttcttgtttgtgagcagacaggcctttgaaccccttcctagtcggtggctggcccagaacataaaggttctctgagagcaggcaagggagtgactctgttgtaggagggaaactcgtacaggccagacggagatcaccggcttacctcagagttcagattccactgattcggagttttaatcatttggttgagaccagaacaaaatttactcttgcgtaattatcaacaggattataagggcaagatttagtggtgtttgtctcagctctttataaacaccataaactgggtggcttataaataatagaaacttatttctcacagttctggaggatgagaagtccaagatcaagagttggtgtcctgtgagagccccctttctcatgatggcgccttcctgctgggtcctcacatggtggaaagggcagggcagctctctgaggcctcttttataagggcactaatcccatttatgaggactctgccctcatgatctaatcccctccaaaggccccacctccaagtaccatcaccttgggggttaggatttcaatacctggagttagggggacatcaatattcagatcatagcagcattaaagacaagaaacacccctgagaacctcccgaaatttcagaagccccacatccacgtcagtggtccataagtcacgggctcacatgccagatgctgttctaagaactgtgcggttactgttgttatgccctctttgcagatgagaaagcgacatacacagaggttacacagctggttagggatgggttcagaggtcacccagctggcttgcggtggactgggatgaaagccaggagtctactggcttccactgggttcattgctggcagcctcctccttattcagagatactgagcatggagtgggcgtcctagctgtccaatgtgggctgaatctgtttgcaaatgagtggatactaatgccaacaatagtaattgtacaggttttattgccgatactatcatcaagcctttcccagcagcctggccccgtgctaagcccttgaatgcatgatcacatttaatctccctaacaatgctagaaggccggtactgttattacacccatttttaagttgaggtaggcctgagggttcccatcttccatatgatttgtgttttcatctctcccctgagccctaggcaaatcagacattgcctcctgcagcctctgcatatatacctggctagtgtccacagtacttggggacctcctctttcggctttggagccccccctccctctgtctctgtatgggcgagcatcttccttctgtcttctcccttccttcttgcctgttagactctccgctccttaaaaccaaaaaaaacaaaacaaaattcccattacttgatcattttacattccctcgttaagccaggctcaaaacattaaataattgtgcatttcacaccatacccaagcctttctgactttgtgattaccaaggtgcattagaatctaaactgctatgttatgctatttgcaaaatactcttggctcttccctgaatcaattcccgtgagggtacgtatcaggtaaaactttgttgttttagatctatttgttcttagacaaagtaaacttggaattgcttttcagtttgttttgaaatattccctagttctgtgttttcacacgtgcacaaaggccttacttcccccattagtctgattctgaagttttgctgcactaggagaatgttcactgacaaaatgttaagtaatggtgctgaaatgtaaagtaattaatgcaagaatcatagtatggggtggggatctcagtgctttaatgagggctggggaaaccatctgactgaggatgttgaaagcggaggggtagatgaatgttcctgtaattaatgctgcatattaaaaaagtgacctctttgggccgggcacagtggctcacgcctgtaatcctagcactttgggaggctgaggtgggcagatcacaaggtcaggactttgagaccagcctggccaacatggtgaaaccccgtctctactaaaaaaatacaaaaattagccaggcatggtggcatgtgcctgtaatcccagctacttgggaggctgaggcaggagaattgcttgaacccaggaggcggaggttgcagtgagccaagatagcaccattgaactccagcctgggtgacagagcaagactccatctcaaaaaaaaaagtgacctctggcatggtcaatatggggacctcgtaaccttccctgtcacctagaactgcacttctgggactctgtggtcctattaataaaaaagataatcaccagtctgcctcatctactgtggaacccttccaattcttttttttctttttcttttgaggagaaattagaaatcaccaaattaccatttttagactatttatgtgtatatgtatattttactctcagatatatttattcaatgcttgctctataatgagagttttaactttctgttttcccttccattatccctgaaaagaatggattatggagaaaagatgaaagtagtctaatgcaatacagtgtttgctaatgtgctgtcagaggtattagtgggacttgctaaggtttgtgtcttttatgaaatgcctttcagattgcaattatctaatagacttggaaacctgtttgtactcttgcaggcattaaacgtcgtctttgaaaaaatcccggaaaacgagagtgcagatgtctgtcggaatatttcagtcaatgttctcgactgtgacaccattggccaagccaaagaaaagattttccaagcattcttaagcaaaaatggctctccttatggacttcagcttaatgaaattggtcttggtaaggcggtgcgggagctatgtggtcccaggccctgatgagtgtccctccctgcctgccctccctccctgtcccccctccctgcccccaccagcttccattcagtgacacttacacagccaggttgttcctggagggcatgtctaggggccaagagactgctttggtctctcatgggcatcctgattcttcgaaggaagcacggtccttcaaagatggcgtttgttgttgttgtctttaaatattacgtctgtaaatcagattgatgagattgcaggccctgagactgcacggaatcaccttgcatcatgaaatacagaaaggtgtcaacacagtgccctctgcgtgtgttgcatttcacattggcatttgatttgtttgttgtgatactgagcgtgtcattactgggtggctcagactctgggtgttaactctagcctgctagaaaggtcatcttcctctgctaatcacatcctgtattaagtatatgctccgtcctccctcagtgtgcagcagcatctgctatgaattcattttcgggctctactggtatactgcaaaggagagcatatgcgtgagcaagctaacagggccccacttccctcaaatgttcatcaacattttaaagttgagctccgtgcagtcctcccaggagactgtcgtgggattttatagcagataatgggacagaaatgaagaatagaatcatggtggtgacagacagtgtaacgaggttcacttccccttgatgtacagttataggccttgactaagcaggcaattaaaatcctcccactcggccctcccagtccagccccctgctaaaaggccattgataaagccttgaggcagggtcttggaagtttgagaccatgcaaatgtggggcaacttggtgatgtggctttaaagaaagcagggctgctaaggcacccctcttctgcttccttccttgggtgaccgttgagtcacttgaggaccattttagctcatttggttagatacaggatcaaagggggagccccagccaggacaccatgaccctgaccccagacccccagcttccttgctctgagcatacatcttgcaaatatgtggctgtcactacaaaggacatgggcataccccgcccgacagtcttggtcctgccgctgatgagtaggtagtagcatccttactcttttcctgagtttgggtgtcccttgcctcctaaagtaggaaggcaaggagcagagcaaggagggggcctggggacacagcctatcagctatgtcaggcttctgtgtgcctgctgatttcccagactacctccagaaaccagccatcaactgtactgaaatccaacaccaggctggacgtggtggctcacgcctgtaatcccagcactttgagaggccaaggctggtggatcacctgaagtcaggagtttgagaccagcctggccaacatggtgaaactctgtctctactacaaatacaaaaattagccaggcatggtggtgcacacctgtggtcccagctacttgggaggctgaggcagaagaactgcttgaacccgggaggcagaggttgcagtgagcccagattgcgccactgtactccagcctgggcaatggagggagaccctgtctccaaaaaaaacaaaaacaaaaccaaaaaaaagaaatccaacaccagaagcagctatgcttggagctcttacagcagagactcaaaaacgcagatgcccaaaggggcagaaaatacataaggggtgtcagccgcctgggactacagaaagcagtggagcttgacttaatgggaaaggactcgccatccaaggggacagtgccatttgcttcagtggttgccatgtggactacagattgtattactagactgttcgattttctttttttaaagaaatcagatatccagttttttatatgcaacttaaaaacttttaaaaaaaattttatagagacaagtctcactatgttgcccaggctggtcttgaactcctagcctcaagtaatccccctgcctccgcctcccaaagtattgggattataggtctgagctcctatgtccagcctatgtgcaatcttttaatctttaaatgttggcactgagttgacactaaaataataattaaacaccatgcaggttccaaaaaaagaaaaatcacatttgtgcaccacatgctcacctaggcataggttagcagccttggccagagagtctgcccactgtggtgctgggaccttcgcacactgatgcctccccctccaccccgaacaggagcctacagagatggttcatatcatgcctctctttgtgaacatgggcacacaagtgtgagcatatacaaatttgcttctggaatttttgttgaagagcttagtcgtccctcatagaatgcattattttgtcttcagtggctttacttccaggcttatcagggaagaagtggtttgaaacatcagagccctaaacaaacaaacaaagtaaaacagaactcagaattcaggctaccagtctggctgatgcatctctacaccttcaaacaaagatttaccactttattcaagttttagttatccataaatttgtgaaagtaaagtggtggcattttaaaactctctaaaaaggaacaaaatgctctttttcagagcttcaaatgggcacacgacagaaagaacttctggacatcgacagttcctccgtgattcttgaagatggaatcaccaagctaaacaccattggccactatgaggtaagagcaagacttgaccccgtgtctccttcctcatccccaatcctagtcccatggacattcttttaaaacatccaggactcccacccatttcctggaatgacttgcagatcgatcgtgtctggggctgaagttttctttcgttgcttgtgcagacaagcccatgaagggctctcacagtgtacttgtcacgtattcccttctcagaaggctatgattttctatctcctgaactctctccaccctgaggttcagcagaaaagaacccaggaaaaaagtctaggaaagccagagaagagttatcctttagccttcactgggtgacaagcgtgctgatgctaaacaaagcccgggaagtcccaagcctcgcctccctccacaacattcacagtagaccttgtaaccttttgtgtaggtccttgcttcctgaagaagttctaaatttcctgtttgtttgcaatattgagcgatacttcctttggcctcttaacccacatactgggtgagtgccgagggcggtgaggggtgcacgtgacttctcagagatctgagtgccagagaaacctgcacataacaagacagaggaggcagtgaaggttcctgaacacactgggatactggggttcacttgtttagcagtattatctgaatctttgttgaatatccactctgataagagctggggctgcatgggagaggagcaaagaccaggtccctgccctcacagagcctgcagccctggggaaggagtgcaaaaaaggacggagagacaagtagagtcaacaccttgcgtgtagtagtgctgtgtggcttggagaatccaagaggcttcctggaggaggttatgactgaactgagagctaaacaatgagaatttagccagactgggctagggtgcaggcacatccagcagggaagggagagcatgcgtgttagactagtcaaaacttgagaggggcaatggagagggggaaggagggcagtgacagctgattatagtcagtgcttatgaagtacttacaccacaccaggtactatttccagcatgtccctgtaatgtaactgcccaacaggttcaccttccccattgcctagacagagctgatttatcaagacaggaattgagataaagtaatttggctgtacgggagacgggagttttattattactcaaatcagtctccctgagcgttcagggatgagagtttttaaggacaacttggtgggttgggggaagccagtgagccaggagtgctgattggtcaggtcagagatgaaatcataggaagtcaaagctgtcttcttgcactgagtcagttcctggggtgggggccacaagatcagatgagccagtttattaatctgggtggtaccagctgatccatcaagagcagggtctgggccaggcgtggtggctcacgcctgtaatcccagcacttcgggaggctgaggtgggtggatcacctgaggtcaggagtccaacaccagcctggccaacacggtaaaacgctgtctctaaaaatacaaaaaaattagccgggcatggtggtgcacatctgtaatcccagctacttgggaggctgaggcaggagaattgcttgaacccgggaggcggaggttgcagtgagctgagatggtgccatggcactccagcctgtgcgacagagcaagactccatgtcaggggaaaaaaaaaaaaaaaaaaaaagcagggtttgcaaaatatctcaagcactggtcttaggttttacaatagtgattttatccccaggagcaatttggggagagtcagaatcttgtagcctccagctgcatgattcctaaaccacaatcccaatcttgtggctaatttgttagtcctatgaaggcaatctagtccccaggcaagaaggtggttttgggaaagggctgttgttgtctttgttttaaactgtaagttcctcccaaagttagttcagtctacatccagaaatgagcaagagcagcttggaggttagaagcaagatggagttggttaggtcagatctcttcactgtcttctaacacatctgcttcaccgtcttataacagtgaaaggcatctgaaaggtttgtttcagatgtttttcactgttcacctttcagatgtctttcactgttatagttttgcaatggcgatttcagtatttcgccccattctatcctatagcagtcctacgagataggtactattattaaccccactttatagatgggtacgatgaggctctgggaggtctggtaacagctagtcagtggcagggccagattcggacctggatagttggctgtagggtctgtggctgaaccagtccatgctgtggcctcttacaagatgtaggggtagggaggcaagcagggaagatgcagatcacacagatgggggcagcctcttcaggagttctgagtcttatcccaagaacagtgggaagccatgggaggtcctgaagcagggaggttagtatttcagaaaatgagtggggctgtgtgtgagatgtagatagaaggggtgcaaacctggaaatagccccattagaagctgtggatttctggtgaggattggtgctgtccagcaataatgcagtggctctggacagacacagagacacacaaatggaatcagatgctcaggaggaggacaccacaagtcacgtggatgggagggatagtaagatgagggtggggtcaaagatatcagttggggatgactgtgcagatgcctggaggcaggtgctttcctagagaagacaggaggaggagcagcttcccagcacaccgggagggtagggaccccctgtttttcatggctgtacagtcccagggtgacaggtctgcaccaggaaggacctaggactctgccagattctccccttgcccaggaagaagtgagactgttcccgagcagagcttcttagacaatggccagggacagagaacacccatccttgggctttttggctgagtgggtcacccagtttgaaagtggttgcgttgggtgatgactgaggtgctgcccctgtggcattgctgtagggagtctagcagagaaagctgcaggctagcaacttgccccgtgctcactctcctatagctcagacttgccaaccctggaatcatcttgccaagagcagtcgttcttagcttttggagtttgtaaaaatccccagggagttttctaaaagtgtgcattcttgggctcaggaataaggggcatctttggctgtatttggaaaaacacggccccagagggaaggtaatggccaggaggagatcggagtcagagatgctgccctgctgggtggaagtgcttatcatggcatcagttcagggttctagacctgcaagccagcacctctccctgtgtctgggtggcaggcttgtcttgatgagttaggaggggacacagactccaaggccctcctctggtgctgttgactggagttcttgtcttgctcagctgtgcctcccctgccaggcttctcagcatcccttggccactgtggggcatggggtgggccgcagaggcaggggatggggctacccactgccattaataggaggaggcagggcaagtctctccagcagggagaatgaagaaccaccacagctgtctgcaaggcaaggtgaaggcctgtcgggagagatagaacatcagtcttcactgcagacatcggccgtgctagacacctatctgcttaaggatgataatgaaattaatccggcctgtagtcacttcccgtccaaatgatttattggcctcataccccagtgttgctgcatggtggtaataaatgacaagcctaggacatgaaggcttaaaggattctccttatgtttaaaaagctaagccataaggcaaataaaccagagagcctgaaggaaacgggaggtcattgggctccatgttctctatgcctggaccatctcaaaagccctgttttttaaaggctgcttggagaaaatcatcccccaccaccctcagccacctacatctatatttgattaagcagcgcctccgcagactcaacatttgggagtaatttgacagggctgggctgaagtttgcttttacccttttgttaaagaaaaaattttctcttgagcactagcatttccctccaaagagacaagatgctaattatcactcttattcatttactaaagcaccctagtttgagtcactgtatgtgcttaaaagcaaaaaaaaaaaaaaaaaaaaaaaaaattcatttaaaaatagggtctaattcagagttttaagtgaatcagactcacctccctccaattagtccacattagttaggttttaaagttaatctgtagtgacggccagttcctcctactatctaaacaaagtccctgctgttggagagccagcctgtttcttctttccttgtctgtccttagggcaaacagagtgtagctggtctcgtctgaatgatttactctcagcacatttgaagaacaggtttctagaggggatttgagggcatgacaaaaatatagcatctcatggactagatgcagcccccagagccccacattgctggcagggccctgtcacctactggctgacacccttggcaacccccagcaccggggaattgctttccatgacaataaccatggcagccagtgcctggcactgctcacatgcattagttcaattaatgtccacaaaaaccctgggaggcaggtgctttccttactcccattttccatctgatgaacacagaggagggtgcatttctgttccagtgtcattctgtcctgtgcagacaaagggttaagcgtgtctttacacatgaagccagaggagtctttctcccctataattaaaccctcccggtgcgcttccttaactggatgtcattctgtgtgcgttgactatgaaggggactgtgctttgctctggtgccaacagggtctggggcatgtgcacctgcatgttcagggagtggggcacactcgtcccctaggactgtggcagggtggtttctctggagtccagccttcttcctctcactcgcaccctgctgtgacctttggctgggccgagttattgcacccgcaccctgctatggagtagtggcgagtgtgcaggacaggtgttgggcaggaaattttctctaaagattacacttcgagttctgagctgcaaggttttgagaggcagaaatgttgtttaaccgctttcattaacagatgtgtactaatgcagaagtggtcactgctaacaaatttgtaattcaaaagatatttaaagctcataggaatgccccaaagggtctgttaagtaaggtcagcaatgcttctggtcaagtccatcatctgtgacactaaaagggactggacaatcgctaaaggtctgttgcagtgtgaatgtctttagatattcatttaacaaacacgtataatgcttcttgtgtactgggtactgttctagggctttgaccaacagcagctctttccgtcttctttaccgctccatgaggtgaatactatcagccccattctgaggcccagggaggctaagaaacttggccagagtcacagagttccttcactgatgcctcaaggcttgaaagcaggcgaaataaccactctagagactgtggctctgcgcagggcctgagggataccttcccccagatccaggctttcagcccatgctcctaacctccgaggcagcctggctagagagctgggcctgattgaggagaaatcctggtagttacattctctgatgtcaaattcataaagggtaacttctcttaaaatcccagggtgaatctcgtgtctgtgagtttatcaaaatgcttccctacttctactttaaccctctttttggccagcagtccgtgaagatgacagttaccttcatccaaagggggcctctctcaggcatctgggctctgacaactccaacccaacaggatcactcttgagtcttaagtgttcaggtcttcgcagtttcccacacattcttggtggcccaactccctcaggaggaagacagtctcagggctatcactaataggccgcagaaggagctggctagtggcctggaggttaatttcaagtaaacaagagagaagcaggagccctgtggcattttctctggtttccagcatcctgtaagccctcccctggatgtccagaaccttctgtgtgatttgaccagcctgtggaggatgttctgacggccccttccaatgcactggtgaacccctgtgctgaaggactcagcaaggttatccctcaagccctgagaaacaagattttgttttcatcagtttccagccttggggcatcagtgagaagagctgagggagaagacgatactgacggagggagagcaatattggcacgtggctgctgggacagcatgtggaatagaattctgttttcacgtaatattgtttcagcagaaaaggtgatttcaggaatgagagatttcaatcagagtttctgtgtagtgatttgattctcatgttttcagatttttttctttaaattatcacaatattcagaacatattcataatttttcataaaatttatagctacaatgccagcatttctcttaggtggagccatatgaaattgtcaataggtgaccatttttacctacaaaagtggtagtttcataaggttaaacataagttcaaccttacatttctagaaaatctcttttcatggaattctaagctgtgccataaacatggtatcttataaagaaatcttaccttcacttgcaagtggtttggaggatgtgtagctcctgtttattttggaaatgacttaaagttgttgatatgggtctttttctccctgagtgattacaacttctcattctaatgatgggaaagtctacagtcatctctgccacttctaacgtggggtggccccaattcccctccattgatgattggaggggaatcgcttgttgtcacatcgaatcctagaaccctgtgagactggaaggaatttaatttgaaattgccgtgcgtaccagttctgctctgggctggagaaacaatcctgctgcagatccatctagtgacattaatctttctttgacttaatttggttttcatccctaaagtaggggcccagaggacgctccctgcctcacaggactaggggacgattaatgagtcactcttagaagagcatttggagctcctcagatggaacaaatggcatctttttaacactctgcattccagggcacttttcaaaaaggcatttctgtccttacctcagcagcagctgacttgtgctaaaaagaaaacggaaacctttcccccacaaacatctgtaaataaactatttttctgtctttataatcgtgttaaagtgtcacatgggggaaatgttccagctctagagcagctgtgaaagttagaaatgcactcacacatacgcgctcacacacacacacaactcatccactaataaaatgtttctacacttgctcttgggagataatttcagagtaaaatttccttggtacaagctgtgtctatgctatcttaatgcctgagcacagcactagcagcgggctgttgccagctcttgaggagacatttgaacttttggcagcgttccttatcagaaggcccatccgaggtatttgtgattatagagtaagggtgctcgcttttggcaaaacaaagcgtctgacagtagtgaagtactggctcaacactcaatgggagacatttgggattcattctttgacaattacccagaatgaatcatcagcttccttttataaaaagatatttattggcttagaaacagagcatatccagctcttcgtggggaggaattttgtaactatgttcaaagcttctcataaactcggtgtctgagtattgctaagggggtgcctgcacagagcatttagtttaattgcatcaaatatggaggagaattgaaaaatcagccagcaaacaatgaatagctcaaggggaaaaggagaggatgctcgttaataggagcagagtcgaagagctcagtaagagttaagaatccctgctggagtcactttgcagaggcctgatggccccagccggcccctgcccagtgctgcccccaccccaccaccaagatatcatgcacaccagcagttggaggcctctggcctaaacttagcggctggctggacagctgtgtttgaggacctcttgagggctggctcttgctctgtgttcctccctgtgggtgtaacctgaaggagattaggttttaatcctttggtgcttgctaggtgggctagtacattctgataaccaatgtgcagcaggccagaagagaaattctaggtttccactctttccaaactgggaaggcaaggtccaaattaatattagaattgagaatagctttggagcttcagaatggagggaaaagtcacttagctgataaggttcagaagtgacagggtcagtcctccagaaacagttccagaatgaaggagatttgtggatctctgacctgcctccttcttgccacccgtttgtcttgtaattttgtgaatgagcccctcctcccacagagccaggcctgcccccagcatcttggcatctttgtccccctttgcccgaagggcacttccttgcttggggatttgcgagtgcccatcagggtgtgggggaggggcactgtagggccacttgaccctggtttccatggtaccaaaaggtcttaggtgagaacgcttgattttaactccaaaagaggcaatatatacagaggcctgcctttgtcaaatgtatacatttaaaatctgtggcaattcttatcagttctattgaagcataatttttgagacagggtcttgctctgttgcccaggctggagtgcagtggcacaatcgtggctcactgcacccttgacctcccacgctcaagccatcctcctgcctcagctgggactacaggcgtgtgccacaatgctcagcgcttttttgtttgtttgtttgttttgaggagagatggggatctgagttctccgggctggtcttgaactcctaggatcaagcaatcctactgccttggcttcccaaagagctgggattacagtcatgaaccactgtgtccagccaaaatataattcatattaccataaagctaattcgtttaaagtatacaatacagtggttttaggtatacttatagaattgagcaaccattgccacaatctaattttagaacattttcatccctcccgaagaaaccttgaattcattaacagtcactccttatttcccccagccctgctttagccaactagtaatctacgatctgtctatataaatttgcccattttggacatttcgtatattctttttagattcgtgggtacatgtgcaggtttgctacaagggtatactgcatgatgctgaggtgtgggcttctattgatcccatcacccagtgaacgtagtacccaacaggaactttttcagcccttgccccagacccatccccgcttttggagtccctcatgtctactgctcccatctttatagacacttcatatcaataggaccatacaatatgtggtcttttgtgactggcttcttcgcgtgtttttgcagttcatccatgctgtagcatgtatcggtaattctttccttttattgtatggcaatttttggtagtatattcatactacatgaactaacacatagtaataatgaactacttgtagttgcaacatgaatacatgtcacagaccttatactgaccctcaaaatctagacacagtacatactgtatgattctatttatatgatacccaagaacaggcaaaattcataaatggtgatggaagacagaaaagtaattacctctggatgaagatggggtggtcattgtctcggaagggacaatgggagcacttttcaggaccttgcaatattttatatcttgataaaggtggtggttatgccagtatatatttaatgtgaatagtcattgagctgcacacttaatattagcaaaagttaagcatgtcccacattatgcttacatttcaaagcttttattaaaaagtatatgcaaattttgtgattttacaagcttttgaaaaaatgtcacaggttgaatatcccttatccaaaatgcttggaaccacaagtatttcagattttggaatttgcttggattctagaatatttgcatacacataatgaaatattttagtgacaggacccatgtttaaacacagaatttatttatgtttcatatacaccttgtacacagagcctgaaggtaattttatataatttgtgcacaaatcaaagtttttattgggttttgactgtcactcatgctatcatgagttcaggtgccgaattttccacttgtggcaccacgttagcacccacaacgtttcagattttggagcattttgaattttcggattagggatgctcaacctgtatatacctacagaaaaacaaataaattataagcgtactgctggatgaattatcatcaagtgagcatatcctgaaactaccacccatgtcaaaaaatagaagccctctcctggcctttcctaatcactaccgctgctctcttctccaaatatctaacatgatagttttgactgtttgggctttttcttttttcaagctctatgtaaatggaatcagtcagtatactttcttttctgtcgagcttcttctgctcaacattatgattgtaagatttacccatgtggcgtgtaacagtagtttgctcattttcattgttttataaactgttgtataaatatgccccaaattattcattctgatgatggatgtttgagttgtttccagtatgggacaattacaaatcgctccctatcaggatttatacttatttctgtggactaaggacctacatgtgaaatggctctgtcatagggtagataccaactttatataccacaatttctgaaaacccatttcagcatttcttaatagagtagtgtcatagtcagttcgggctgctataacagaataccattgactgggtggcttaaacatttgttccttatagttccagagactggaagttcactgtctgggcaaagtactagtagctcggtgaggaccctcctcctggtttgctgagagccgtcttcttgtatccttgtgtagtggaaagcagaggggaccagcaagctctgctgtctcttccttttcctcctctgtttagagacaaggtctcactctgtcgcccaggctggagtagagtggcacagtcagggctcactgcagccttggatgtctgggctcaagtgatcctctcacctcagcctcccaggtagctgggactacaggtgtgcaccaatgcgcccagataattaaaaaaattttttttatacagagggatctccctatgttgcccaggctggtctcaaaactcctggactcaaggatcctcctcttcttcctcccaaagtgctgggatcgcaggagtgaggcaccacgcccagccctggtgtctcttcttataagggcactattcccatcatgagggctccaacctcatgacttagtcacctcccaaaggccctacctcctaataccatcacactgggattaggatttaaacataggaatctggaggagacacaaacattcagtccatagcaagtaacaattttttaacctcaaaaaatgaaactggcctaggtcttgcctgacctctgcgaattggggggaatgtcctaacacagctcagtcttcccctcttccagggcttcccacctcccatctgtcccacagggtcctggcctccaccttctgcgtactaccccactgcctcccatggcctcatcagcctcctccacaggaccatgagccccttgaggacagagacactgccttgcttgtcatttagtcccagcctccagcacagtgcccagaacatagtaattcttgataaatatttgatttaataagtgacagcatgtaagatccatccagccatctaattcctgggtgaagttgagaaatccattaaattttgaacactcatatatcttttatctttggtttcagatatcaaatggatccactataaaagtctttaagaagatagcaaattttacttcaggtaaccaatataatattgttaaccttttgttctcacccagcttcataaagtattgctttttgcctctctcagctgtattgtcacaaaggtgagattgagttgttgctatgtaattctctgaaagttgagaaaagtcattttgatctctttgcagtcctaagaatgtgatccctgcaagaaggaaaggaaactatagatggtggttggcctggactgcccagcactgaggaagtggctgcctctttatagccctaaactcagggcagaatctcatagctttttttcaaccctttagaaggatggggcctaacagaggagatccccctggcaaactgagagggaagagtacagacaatcatcacagagccccgaagcaagcgctgaacaaacaagataatccacttagaaggtccaagtctcctgtgatagcacttgcaaaattcccagaaattggagagagacaaactaaagggggaacttttatgggaaagtcaataggctggtctctaaagtgatcttctgcttccctgatagccctggggcaggaaattcctgttccaggtttgtctccagagaaattataccccagtcaagacaatcagctctcagcccttggaaaggttctgagctcctcccaaacaggctcctttcacacacacagccagaggtagggcttcctgacttctggattcactattagaaggagcagggagcatctggccagtgcaaacagggaatgtggggttcttgattatacagacaggataattgggtaggactcctttggggaaacccaccttccatcactatatggggctgtggtgaagccatcttgcagagatcattccagcttaagggggatggtgtctttgtgttgaaaagtggaagagcatggtttttaggtttcaaagattgggccttttgaagagcctattatttggggattgaatagtagaatcttaggtttggatctcttcgtgggccctccagtcagtcaacactgctgctagtttccattcactgcaactgagagccaccgtcttacaccctgctaatactctaaacctcctgtacctctgtcctatcatcagcccctctgtcaaaatcccaacgctggatgaacccaacgattatcctttcctgaccctacagctagggagccacagaagaaaggcacataatggcacacagtgggtcactataagttcatggtacccaacttgaccagggccctccacacagcctgctctcattgggttcctctgggcaattcaactctgtgttgtccataatgtctgccttctctcctcaaagctttgacccacacagctctcctctcagcagatgacttcaccctgcactctttacagagaaaactaatcagaagtccttcaacagccagtagcaaacctaccaacctacctgcacctgccttcttccttgatgcttgtaggctgaccttcttccattcaaggccagtctctcacctgtgctttgggtccaccatcctttccaaccttcttggtatccttacaccaccagtaatctcttttctcacctgtactttcttttcctctccatctactccccattttccattagcatttcaagatgtgctcgtctctctcatctttatttttaagacagtgtctcgctgtcacccaggctgtagtgcagtggtacaatcatggctcactgaagcctcaacctgctgggctcaaatgatcctcccacctcagcctcccaagtagctgggattacaggagtgtgctaccatgctcagatactctttaaaattttttgtagaaatgaggtctcgctacattgtccaggctggtcttgaaatctggactcaggcagtcctcctgccttggcttcccaaagtgctgggattacagatgtgagccactgagcctctctcaactttaaaacaaacaaaccaaatgccttacttcctctcttccctccatttaccactcccttaccctttacagccacatttcctcactctgcgctactcttgacttgctctgtgagcaccacctcattgtcctttgagatcctagaaagggtcagctccttcctacctttggaccttcctgcaatttgcctagctgactctatctcttcattagattcagctcaagcatcccttcctcaaaaactcctggactagatttggtctcttgttaattctttagcatataattctccttcataacctttatcacagttataataattgtgtacctagaagtttgatgtctctcattggccagaatgcaaattccatcagggtgggaactgggtcttattcattgctatatgcccagtagtccctggcacataggaggtgttctaggtacatttgttaaatgaatgaggcttgagcctctcctaccagcaagagatcagagatcactagggaatctacttcctcctccaatccctcacccgtcccatcttcacgctgttcttaagatcttaagatgcagcagggggaaaaatgtagctatggagagctcaagtcaaaaagctcaagtaacttcagtatacagcacaaatggggccttttaagagaaggccgattagcccatggttgctttttttaatggactgctttctctccctctttctctggcattcagatgtggagtactcggatgaccactgccatttggtgagttcaggctttcttgtgctcaccactgaactgcatgccttctgtagcaagagtggtctccttgggtaacgcttctgctgtcttcccttcagattttaccagattcggaagcattccaagatgtgcaaggaaagagacatcgagggaagcacaagttcaaagtaaaagaaatgtatctgacaaagctgctgtcgaccaaggtacacttactgttctgggagcactttatggctacctagggggtgtatgatatgtttgacttaatttccactgaagtgtgaaaatgttacaaatcccttgtgccttctagcaaagcaaaatgaaagtttaaattgtaaacacttcctacccagttcctcttctttttatacactacaaagataacagcactttacagatttgtactgtagtatcttcagtcagggatttaatattgttcccagtctctttctccaccatttcactattattgttattttttaggttgacagcataattattccttttggtttacttgttattatagatgagcaataaaactccctttttgaattgcgaataaaatgaaggggatgggaagggtcaatgactataaacctagtaaatcttaatttttgtttttcattttaaaattaagaattctgctcacacataaaagtgtcagatgtgaaagccggtggaataccaaaccgagagcaaattttactttatctggcttttagtggaattaacagaagtctgtggtgatcttttttttcctccccctctggaatgatgagcactataaatgctatgatctacacttggccccaggaacttgatgggcatgcttcttcagattataacaaagaatctgcttagagcttaggagatttgtttagtgggcagaggacagcccaagcctcttgattttctcagctgtcccatagagcccagcctatttggcttttgtgaaatactcaaatgctttggaaagtacacaataaaactttatgatagaaatatatgcaacaggaaaaattctgggaacagagcagcatcacttgagcttttccaggctgaacataactaataaaagccaaatatccatggcttcctggtttatgtaaacagccctacaactgacatttcaactgctagagatttctgatatcctcccagttgactaaacaatgttatcagcaagaagcttatgaaccaaatctaaacctgggcatggattttcaagacttttgacctatactgtgagcactggccacatttgacaattttacatttttctcttcagtttgtttttccctgttttgaacattattttctctgaatgtggatttgcttttgctattatgttttcaaaaccactaccacagtttttaatctcccaaatctgatgttgtctatctttcaggtggcaattcattctgtgcttgaaaaactttttagaagcatttggagtttacccaacagcagagctccatttgctataaaatacttttttgactttttggacgcccaggctgaaaacaaaaaaatcacagatcctgacgtcgtacatatttggaaaacaaacaggtgggaatgtaggtgattagtgactgttttcaagaatctgggacagaatattaactaaaagaaagacatagatagttatagaaggattcatttatctctatatcagaatctttgggcttggtaagctatcatgtcaaagtagtttcttattctgttactatttttaaacaataaaggaaaccattcctatgccaagaatcctgttcttgaagataaactgttatctttggtgcatgatactttgtctagaatgttaaaagaaatttaagttgaccagtaaagaatgagaaattaacatttgtggttttatatcatttttgcattagagaaaattttatgataaaccattttttgttcctaatcggttactttgcagtctccaagctgtctatactctgattctgtacagaaatttatcaagtgcagtactcagatactatgagaattagccaaaagtttgtgttttgttttatattttaatattttaccttaaggacaggcaaggcatccaaattttgcctcctcagtaaagaaatgtagctcatgagctctctttgaaatgctgtgtgcatgggctggataagactcagagttatgatgaagtagaacttctcagtgcaagctcaaggctttccaggcactgagggcagccaggtcactttaaatgagtatcaaaagctgaagttcctctaggtctaatctcccatttaatccaggcctatcccaattctctacgctggcttgctcccttctcttcctgtgttctagcctctttttttttgagacagggtctcactcttgttgcccaggctgcagtgcagtggtgggatctcggttcactgcaacctctgcctactgggctcaagcaattctcccacctcagcttcccaagtagctggaattacacgagcatgccaccgcactcagctaacttttaaaactttttgtgagatgaggtctcactacactgcccaggctggtctcaaactcctggactcaagccatcctcctgcttcagcctaccaaagtagtgagattacaggtgtgagccactgcccctggcctgttctagcctcttatctccagtccctgccactcccacatcaagactgggagctgagggccaccattccaccttgaagattatggcatctgagcaggggcagcagccaggacagtagagctgttgggagacctagcagcatatgggggaggtaatgagctaggccagagttgaaaaggagataatggaaggactttgaaccagtcccaagttcatgttcgggtatttgagtacctactatgggccaagcagttagttgctggagatatagtaacaaaacagatgaaagtccaggtcccattctaatagttggggacagacactaaatgcaatatgcaaacagtagcacattagcagatgatgagtgcagtggagaaagtaggaaaggaggctagtatgtgtcaggactaggtgatctgagaaggcctcacagagatggtgacacttgaaccaagtcttgaaagaggagagggcataaaccatgagactacctgaggcaagaaagtttcaggcagacagacgccaagagcacaagttgtgaggcacgtgcttgcttggcccatatgaaaaatagcaaggagaacaggagagttggaatgagcgcggtgaggagcagtgggataggagggccaggtcatgcagggtgttatccagagggagatggagagcctcagagggttggagcagaggagagacatggtctgattctgtgttgagaggactgctgatagttatgtgagaacaaactgtcaggagatgggaaataatccaggtgagagagattataatcaagagctatctggagaaaattcttgcccatggccactttcaaacttaccctcctctatccttcttttacagtagctctgccagttaaccctttcttcttctctccaagtgacgcttctgtctgttgcttggtatgtttggctaagcagagttgtatacttcaataacaaggacaaaaacacccgtttacaaactgtgataaacagaccattggcttcatgaatggccctatttgaaaagagattattctctctttgaacagccttcctcttcgcttctgggtaaacatcctgaagaaccctcagtttgtctttgacattaagaagacaccacatatagacggctgtttgtcagtgattgcccaggcattcatggatgcattttctctcacagagcagcaactagggaaggtaaggcccagcttgagtatttcttgtatgcagtcttatgagtttgacatacttgtctttctgataagcattcaaataataaacaattggtctaaactacaccagctaaaaagagatagcaagggccactgtcaatttgctgttatttaaaatctgtctcattatttttaatctaatttttttaaagtgaaaaacaaaataattagccccacccaactgcagaattctgcctgtgaaaaactttatcacaaagtatgcgttttgtttcctagaaaaatattctatggacactgataaactattaacccaaaatatgcaaccattgaaatttgcctaaatcaattctatttgaatatacataaaatgcctatttgaatataacacattgcttatgggacacaaaatcttgctcaagatttctaacaataccagtttgtcagtttctaatcaaagcatgagtactgttttcctatggttttctttgctgatcaatagtcccaagaactcaaagaaagacaaaaatcagagcaaacttcgaaagagatgttttggtcttatttgagcgctccaaaatatactaaactgagcaatatctgtgcctaatggatctttgaacactgaggaggagttcttgggcaggactttaagagtacctggaatgaatggagactgatgttccacaggtgcctcagactcccagtcataatctaaactctttatcagcagtatttctgcaaaacaaacctgtttttacttttgtcttccctagcattgcctagtctctcaaggtagaatcctcaacgttatctttgactcctcttccttccaacctctatccccaaattattggttaccacttacttctgtctcaaatgtctgtcgctccctcctccttccttagccttatcacttagccttatcccttcatcccgtccctactgggataactgcttcctaattggtgtccttgcccctgctgtccacctttccttctaaacttttccttttcactgtctctcaggtaatctttctaaaacataaatctgatgatgtcagtctgcttcttaaaaattgcaactatttcccattacctaccagctaaagtcttcacagtgccacatagtgcttcctgatgggcttcagccctctttgctggcctcgttattttcttgcacgccccacatacccactgtgctacagcttttacttttcccaagttcacaccatgaacttgttctcacacccctttgctcatctttcctgtctcacagtccctctgtctagtaaaatcctacccattcattcatcataaacattttattcattcgacaaatatgatttcctaatgaggaccagaaactgtaggagactcagatcagtctacatatgcctactttgtgaactttccccaatatatttcctacagcactttcttcatttgactaataaagttcatcttagcatgcagcacactgaaaggcacttaaatgtttgttcacactaaaaacagttgtttatgaattatgttcttgacacacttcacttaatcctcacaagtaccaaataaggtagttattattaccctcattttatagatgagaaaattgatgttctgggaggttacaagtcttgcctgaaaccacacaaagtagcagaattatgatttctgatttgtccaactctttctgtcaactactgctgctaattatttgtatcatagtaagcacttcataaatctgtctttgcaactagattgtaagcttctcaagggcagccactagtctttatcattgtactctcaatgcctgctccagtgcttaataatgtttattgaatgaatgaatgatagcatgatttctgggttccacttaaatttgacaaatgagaaaatctcaataatatctcagtctctaggcatccttcagaatgattcatcaagccattgattcagcctcatgggctgggacattagccctatcattaacttacctatcttccctgagtagaattttttaaagttttgtgaaaaataatgatttttaaaaataaaatcatatttaatttttaaatatcactgttataattacgtagaatcattcaaattgccagagaacctctgcaaaatcacacatcagagccaccaatactaatgaccatgtgcttccctgaagaaactggatgatgtctataatctaatgaaataaaagggacaagctggaaaatctgcctctgccaattacttaccagtttcatggttatataaagggctcaatcagacctacaatcaagtcttttgtaaatgccaaattcactggtgggtgaggatgagagcaaatgttttaattcaggctttttacaaccattagtaatgaactatgattgaaataagttccattgttacagtaactcaaaatcatgcaaaaataataattttagttcttttatgagaggaaggcagaatatattagcatttaatctgcctgaaaataacagtgactcaccagaactatctagatagcagtcagtcattcagtcaacaacatttaaggcctactgcatgaagccttgttagcaagaggtaaaactggttggtggtgggggttcagctacattggaatattataaattcctccatctttttttttttttttttttactcttttggtgatggttgctttttttttttttttttccccaggaagcaccaactaataagcttctctatgccaaggatatcccaacctacaaagaagaagtaaaatcttattacaaagcaatcagggatttgcctccattgtcatcctcagaaatggaagaatttttaactcaggaatctaaggtatcattagaaagcagaaataagcttatatttggttactttacgtcatttcagaatctctcaacaagtctttcttttagaaacatgaaaatgaatttaatgaagaagtggccttgacagaaatttacaaatacatcgtaaaatattttgatgaggtaagattttaaataacattgtttttaacctttgaatcaggcacaaggatgtggttatagcattctgtcagtttcagaacagctctggcatcccaaaaggccagaaagggaagccaggaagcctgtctgagatgggggatcctggcactgagccagaccctgtacatggctgccccccttacagttttatcatgctgcccacatttggaccagcctgaatttacatttgagttcatggggcctacagccaccctgactcaagttaactttgatgagtaagtagtggccctattaaatggggtcagcttatgcttgattgtaatttgctaaaaatgaaagctaagcttgttaaattgcctagattctgtattcaatcgttatatgaaattatgacatatttctaacttaagcgactatttcaataaaccattctcctttatgattaattctccttaatctgggtttttttctttggaaattcaaacagacacattcatcagatgctttgtttccaaacaaatgttaactcccccttccctgattcccccccaatcatgctgggacaggctatccatgtcaatggtgagaatagctcaccaattccatttgctacttgaagatgaagtgaagctctaaggtagggtagaggcaatgagttcttaaacatgataagcatccctcgttccaggggtcaggggagagaagggaagcacgaggagggactacactgcccagatgggagggaagggaaggatctgtctctgaccaggatgtccctgcctgctgcatttaaggagaaatacttgcctgcatgttggctgcccaggaatgcttgctgtgcttggaatggctgtgacataatgcataaagcagggcctaggaagcctggccccatatttgtaagcaaatagttggtatttcttgcgagcttctattttaagccaaggtattgttgatcctgtgataaggacttagcaaaacaacttgcaaagtgagtatgtaaatgatggaagaaaatgttggcatctgtttcatacagattttaccactcacagcatcaggtatgcaaaaaacagaattgtaacgctaaaaccacaatatctaaaataactgttctaattgtcaacagattctaaataaactagaaagagaacgagggctggaagaagctcagaaacaactcttgcatgtaaaagtcttatttgatgaaaagaagaaatgcaagtggatgtaagcactctggggcctggcttaatctggcaaagttcttcagacgacttgggagcaaaatggctgcttgagctactctgtgtcgttaatttgttgtttgcacataggttccactttgggcactgtctttttaagagaccaaggcacatgcacagcttttagaaagcataccaacccttgtgcctgtgtgtataccgtgggaacccttctgtaaatagagttgaagtggttgttgcaaacagcctccttgtttacagagaatacaaggccagtaagcgaatgtcagtattgtaactacagtctccacttaagcacaatgatataagtggttttgtttgaaaactacagctatgtagcacttgtgctacactgcacctctgcattgtaaagggatactgccagtgctcaaaacaaaatgtgaaatgagtcatttggaaacaaggtgggggtgttagggcaacctcgaggatttgcagcattgaaactttccccagtagttcttggaaaagctgaccgcagaatttggtagtgtacacttagcatttgtgagtgtgtgtgtgtgtttaaaccaaaaactaacagtgttgcaacattgttgaaagggctcgtgtttttcagtggtcatcaactgcactccatcaaactcacctccatttcaccaaggagctctaaagtaaggagagtgggctttatttaaatgaacagcattttaaccagatactttgtcctaatgtatgttccttttcttcatctgttttttcatactaaatgtatttgatagtggacatgttggatattatacaaaaaaatcattaattcatttctgttccaaaacctttgatcagaacgatctgtggaagagtaactccatttctatatgagtgagtgtctccttgctttagatttctggtgaaccctgtggttatgaatacttgtgtgtgatttaaaaaaaaaaagatacattttacattttatcgaattgctgttcacactggagtattatatataaatatatatatttgaggcccaaggcctgaaaaatattagtatacaacttggtatcttagtcttactatgtactttttgaaagtattcctcgcaggagaaagaatttaaaatacccattttattcatgcctttctttttaaagaattctctatccagttatactgtagtctttttagtgctgattttttaattcctgaatttttgctgctcatgaccagttttaataccactgtgttttccttctattaaaccagaagaagtaaacagcataattggcaactcttgagcttttcttgtggcaggcaccttttacccttggtgctccaaatcccccatctaggaaagaaaattttttcaagtcaaataacattgatcacatattccttgaaatcatttaccaacactgtatggagcattaggatttaaatatgaatttgtcttaaaggcaattcctttttgcttctgtattatctggaaaagcatgagagaggtgacacctcaacaaactgatcagagaaaataagcagttactaccctgataggcaccttcccaatcctgttgcttttgaccattgtctgtccaacggacacacctcaaacaaacaaaactaccaaatagatgacagatcagaataaaggtgagaggtctggtccccattgaaggctgctacagtcttcaaagaggtgaaggagttcataagagaacaacagtaggaaagttgagagccaagggtaggagagttgcccaaaagacttcccctactactttagggtactgaaaactcaaaggatcagctacagctttatctaagtatttactaaatgctacatgagggtgtccctgtccagctttctggcacatgagtcctgtgtggagagttacctcctcttccagggactgtgctgttgggaactttgggcaagtcacttacctctttgtgcctcaatttctgtataatatttctaagctacctcactgaggtggtatgaagattcactaatgtatgtagcgtgtttgtcaatcctccagtgaaaagcactatctagatcacattttggatcacattagccaaatgcagtaaatggccaaattagatgtgtgctgaagacaatcagtcactgggtctatattaaacagcaaccagagcaacaaatggcaaacaatttctattttcaagtttctttgcatatttttttggtgcaaaaccatttataaacttttttttctaacactagtgtctacagcagcattcaaaaaaattctgttaccttttctgtattaggatttaaagtctatttcttattgtatacctgattgaagctgttcttggagatgaatgttttaaatgtctatatccaaaaaataaacattttgatgtaactgtggactgtcttttttttttttcaattttctagttataatagtttttttattctaagtggctccgtggaaattatttttcagagataaggtgtcactgtatatgctgtgaataagcagctatattatgtagtaagtaaacctagtttgctaaatggtgctaaggactgctcaattacagtcctggccttcttcactatcaactgggacttttgactatgaacaccttgggataatgaacattccacttaatttgggagacttgagctttagcctcgttaacatgaaattattccagcagaattcctctaaaagatgtcacattaaaaaggcttccaatgggtgtagaccaaaaaaaatgagagcatacttagggacacaaaacacataattatttggttagatccacagtaatgggaagtaaagttaaataccaacaatgtttataaaaggacctgagttcaagttttataatcaatggcccccttgttaatacagccataggatttaattatttgcacttattctctattctaacaaagccaaaatcagtagactgtcatattgctaaatatatgctatatggttgatgtaaaattaaacacacgattaaaaaaaaattaagctctttaattatgtgcacacagattttagaaaaggtagccttttgtatatagatacctttacattctttaggctgacttttaaattgtcatcttttttcaactacagtttttgtatatagtaaaccagaagatgtgtatggaccctgttatggccaagcatctcaaagatgaagagagaattaatgatagttatatttcactcaaaatgccaaaaaaaaaaattcaacaaagtaaaaattttaaaacttgactctaactagttcctttttgttttacattctcaaaccattgtcaaatattctaaatatctctgagaatttctcttttaatgcttcacttgtataatcttaaaatcctgacagtcatacaatacagcatgtagtaggtaccttttcttgaggcacattcaagtgttttggcaaacagtaaaaagtatctaaatgccacaggttaaaatgtcaagttttactgagtcaccaacttcacctcttttgatctgcctgttctccaagaacatcattctccggaagatccaagttcctctagttgttttctttgtgttgtttccagttcttctagtcttttgcgaagtagagagagttccctttgatgttgttcctccttaaaatgatgtagagaaagcatagcaaaagaaactattagaaaaactgttaggtagcaaccttggactgcctcttttatatatgcctataacatctggcaaggaaatgctgaccactgtagcagtctaaaaacagtagcatgggctaaactaccatctagttttgcttctctcctgcctcaggctctagccttaagcaaaacccgtagtctgttcttctctaggtataaaattcaccagggagtgaattagaaaat

SEQ ID NO: 473 - DNA, 489781 bp, Homo sapiens
  source 1..489781: mol_type = genomic DNA
tagccctcagctcccaggagggctacccagttggtgcacggtctcattttatttggggatgctgatttaactgtgtgtgtgtctgtgtctgtgtgtgtgtgtttgtgtgtgtgtgcgcgcgcgcttcggtccttcattctttgctcctaaagatttctttaacaatgttgaaaattgttttgttttttttttcttacttgaagttccttttgattaattttcaagccgtgggtattatgcaataatatacataatagtatatattctgtattaaatatttctcattgctacccgacctgtcatcagtttagagccttgaaaaaaatctccattttaatattaacacaaggttttcccataaatttgttttgaaaagttagggagagtatactaactaatgaacttcagttaaaaagtaggcaaatgaaaaaaaaaaagaaaaaaagtaggcaaatgcgaatgttcttcactgccacaaagccaccaagttaacggatggtgtttatgggtttgggtttttggagagcaactttacaatacctgtaggattgtcttgaaagtcaggttccgatctttagcctaagaaggttaaaaagttggtaagttatattcttttcacccttaacaataactgacccataatgcattagcaatctgtccctagattgtgaggaatcagatagttaaaattaaatttagaaagttaaaatacttgtcatcacattaaaaacacattacatcagtttagatgagctgcaagtaaatcatcccttacctttcagaagataaaaagtttagtgactgctatttacacactttgaatattttatattacagtggtcatcatcatttacacggattattttctatgtccacttccaattcacaaatatcagggtgtttgttatgtagcagttcacatttcaagcttctctgaaaaggtgtccttatataaaacaacagagataactgcatattatcaaaaggtcatttagagattttaaaaataaaatcattagggaccccttaagaaaagtagagcaatgaactgtaattttaaaaatgtatataatagcacaaaaatcaaagtcttaatggacactcatttgagatagttcattttgtttttgttttgttttaaacatagatttctagagcattaaaaacaatcctcataggtttgttaaacctttagcggaagattacagcccatgtttttgtctttggtgaatagctgtttgtctcactttatttacttggtattggatatttgtcaatgtcatttcatatctacagaaaattcttacgctctgtggaggtagtgaatgtgtgtgtgcgtgtctgccggaggtcacatgacggtttcattctatttggtggagcagcttgactttttttccccttgcttttggtgatggttgtgagtgcagaagttgattgacagatgcatgccagaaacccccattctccttttcaaagacaacatatgatggattgctatctctcagcgcagcaggacacggggaccatgcaagctgtaattggtcaggtatggagtcagccatttctcaactccccttttttccacaagggtctcaccatatgattcacataattcatatttacagtaccatctttctatctgtatcttcagctacctgccagtgtagtgctgaaagtgcgaaaggcaaaaggcacccattaaatctgaccagggaaacctcagcttaaaacttcaatgcgatccttttaaacaaaaactaaaacaacaacaaaaacactggagaataaatctaatttataatttggtctgaatgtttcttaaaaatctattttagaaatttgctttctttttggattttgatctctgaaagaaagtgcgagaagagaatcaagtgtggtttcctaggtagtagttaatatttttctaatgctgttcaatatttttattttgactgtgctctctccttctctctttctctccctctctccctttctccatatgggaaatataaatatataaatacatgtgccttgacttctaacccagataatgtgtgattgagcccggtaaatgtagtagtagtcttggctgctgcagaagggcaggctgcaaattaaacactgtcacaatcttgaaaggtccaggtggtctgctcgcgcttcctaatgcaatccagcacagcagctttaataaacagctccatttagtgcctcctccttgtatctagggaggtgagctggtctggggctgctgtgatgaaatgccagaagaatatctctcagaggcctcacaagctgatttttagagctttcccgctctgtcgtctttgtcttccaaatgggtcagtgaatcttgctctttctgtttggtgctttccgtgaagtcagtagtttatgtttgtgttaaaatgtttgcgttgtaagctaaatcagaaaacgaaaaggatcattgtattttcatttgccttcagataactaaagtggtggaaggaaggatagtaccctcctgcaaagggagggtgatttttctgactatgatgggggtggggtaaggaaaaaggaaatatacatggtttcttttcttttttgtaatgtatttttgactaaatttttctaagttatctatgtttacttatggattgttaactcataaaccagactatggtcacgaatatttataaactcctaaaagtttttttttttgtacactttccaatcaagacaagctggcaaggcaatgacataaaatttgtttgctttatgttaatagcatggtggaaaatatatcatcttattctgttttcaacaaaattatagaaaagcacttcagggttctgaaagcacatggtttattaataccagcatgcttgcttcataatgtatttttagatggaaaatgtcaaatacataataccatgttttcacaggctcacactattttaaaagaagtagatatttgcttcgacagagaaatattttttaaaactttcaagttaatttttgttctataagcatatataaagtgaagtctctaggcaggagaaaatatataaactgattttatatactcttaatacctgtttcaatgtaagtactcactgacgagcaaatatatcaaatatagctaaaataattgtggtgtagggaatgaaataaatatctgttacaatagatgacttttgcatattgaaataaaacttgagcccctgatcactgtcttgtcctgtttaataaaacttttcttaggttgcaggtcctgtcttctgtatggcatagttatggttcttaataccgtgcagaattactgtacttcaatctctaataagaataggatttcctttttctatatatttctggtgaaaaaatcaggaaagtcacttgtagtttgttattcagtattgtttattggaaatcaattgtaaaggcatatactttttaaaggctcaggtatatacttaaaaaaatgaatcaggacatatttttacagatagtaggcttaacttctaatttgtcaggatttaaaattagttattattacatagctctgtattttgtatgtactctttagtataattgttaaaggttccacatgtctaagaactctacaggttaatgacttcttatgaatacattgtaaatagttgcatcaaagtagtcacatgctttctgaaggtgttatttctcataatttgttaaaaacgcctcaaaatgccaagtcagtaaattacaaaagcaattgtgctgaaggttgtaaacatttctgtgctaaaatgtacaaactagaatgctgattttttatttgaaattgaaacagtaagtatttaaaaggaaagaagaatagaatattgtcctatatgtataccataaaagtcagaaagtctatattgaaaccatatctagaaatataaaaaagaaaggtggtatacatatttgaagtggattcatttcaatagttacagcacagataagtgtatttactcaaatgattacttctaacaatagggaaaagaatgtgaaaataatttttattgctctgctgtcactcaaaaccagaaagggatggtttattttttagctcttgtcttaaatatcgtcttatatctactcagcaggtgtgaacaagcccatttaataatgcaaatgtttgtgtttgtttctgctcaaatacgttttggaataattattatttttgtcttttttttttcctgttctgagtgctgttcctagatggctttgggttggaggagcaaataaccagttttcagtcagaatattgaaagattcccatgaagtatgagctttaggttttttcattcactcctaggatgaaatatccacagttgcttccactgtagggaagagtagacttttctgtttctggccatgatccagctcaggacacagcgctggcttcacagagtagaaattgctcatatatgcctttcccctaggatttctcctcccccaagcaagcaattaagcagtctagtacttggaagaacaaactccctgcctagtatatcaagatgaagaaacttggttcattcacacaatttttggaaatcaaatcagatttctgatagcaattacctgtagttagcttcctaaccccttgaaggtaggatggattgttattcatgggatgattttcaattcaattcaattacacagttaatcagtttctgatcgttggtttgattatcatttagaaatgaagacttgcatttccatctcttatggccatgtttagtgcttcgtttcttttttttgcagacctgagcttgtgagtgacagattagttcatcagtactgcggacctcctgtttttgttttttctcatctcatacagtcgggtcactgtgtccaatactccttctggcactgctgtccccagaggacttaggcagcccaccatcctgatgcacaggcctgagggtccctgttggcttcacgtctatagactgacttttgcaaatattgcagaacagaggatattaaattagttgttaataaaaacaacagatgaaccaaattagatgaaaatatttatcaagtatatctaagagtttgctgggagtgagagagagacagctggataaagtgatcatggatgcacttccagttgacattgctaaagtactagtagaagagagaagagaccacacattctatattttaatagcattagaagtgcagtaaaaagctgtttacaatttcccttactggtacaatgggtcttttatttttcaaagtacatttcgaccatgtgaagtgttgtaaagttgtacatcagaaaactaatgcaaatgtctcagacagtgctcagtatgtgtgcatgcatttggcttaacagtatctccatgtatgttttcttatatggagattttaaaacacacaaatatttcaccgttatagcatcaaaacaattaattttacatagaggtttgtttataccatcccttgttccaaaaagtatttaatgtagatttaataataatttgcttacctaaaatatgctcaaattgatgtgtgatgcaagtggtctagggagaggggacactggctctcataacacatttgaagattgccctctgtcaatttagactgatattcgtgccttacatataaaaatgaaacactggggctaacctaaccctgttttactcatgtgaagcataattcccatatactcttaaaaaaagtcatttttgtgggtgtgaatgcctgtatttttgaaactgacagattgcttcaacaaatttatgtattttgggagtgtgaaattattactgctttaattttattgagaatactttttccccaaggtattatggatggatggtatactagaaaaaatacagattaattaaggattattctttcttatacatactggtgctagtattcttttggtaagttccagactgaccaaaattgaatttgtactatgtattgtttattgacctaaaaaacttcacttaatatttcattcatacttataggaaagtcttatgttaacattttacatttcaccagatggacttaatttttattatgtttagaatttttaaaaattaaagcagacatttaaatggtaaagtcaattttgtccatttaagtaaaatttaacaatatagtaatactactatccaataatgttaatactaaacaacaattagatgaacttgggtcttgaaactaaattttcttttctatctctaaggtcaattaatgaaactctctgtaccattcaattatcattttcaatgcttaagaacttaaaacttttttattcttacctctaacatatgcagagaggtggctgcaacttttagaatacaaatgcttacaaaagaaagtttgcatgtaataagtttcctgcgtgtaaaatctataatatttgtttcagaggtcagtgaaggatgtttcttcactgaccttttctttgctatgtaaactgcatattaccagtttcaagtatttttctctttattgcttacaaaaattggaatataattaacatgtctgcaaatactgaaaaacttcacttttcaattgcattgtgatattgtacaagctgttactcttttctaatgcttgattgagtagaaaataaagttgggacataaagtgcaaacatgaaaggatcagacttgaagaaacaatgtgcaaaaagataaatattgactttaatttgaacgctaaaagaaaatccaaattacacaacttctaaattaatttgtaatttatggccaaatctttacttgggagataatagctgctctatatataatctcaaacctggatttatgttctttttcccttccctccctccctacatccctttcttcctttctgcttttgttcctgcctccctcctttctttttttttttttgtaggtgaaatgtgtatccaataaagtaaattaccaactcaagtttgctctgttagcctatgtaaattgctctgttgagccatattgtcttaaactgatccaaaattgtaatcaagatttgtaccagttttgctttttacacatttcttctgcatctcaatttgaagaagcggttgcgagtgaaacactatcactacatttcagtaaagatttatttttctttttattattttcttgttcttcccagttccacaatgtgagccaattgtggtgaatattgcttaatttttactggaaaaattccttcctggttttctgtatgcttgtgttatttttccacaccccacttataaatgatcatattattgttatttcagggatagcacttctcataaacgtaaaaccattgtatgtaagtaatagcaaaataattgaaaacatctttgattatttacattaaaggaaattctctaggttttaaaacacttgtttttcaggttggctggtcttcagaaaatagctttttgttttatcagtagctttaaaacccccatggtatgaaagattctttcttcaaaagacagacattagctgttgatacttggcactgattctaggtgaaatgcaaccctattcctttcaacagcacttttttaattataagacaaaaaaaattgaagatcaactgagtattctcactttcacctattttcagccttcccccgacccaggaggtacatttttcccatgggaaaaagtacccacataatttccagcacttccctagtcctagggtcaaagatgcaaataaacgtgttgacacctttaatgaaaaggatatagtcgctcaaaagtattgctctgacattttgttctccttcttcactgccatttctccatcagcttttcttctcttttccactgtgaaccagagtcagtttgatgagtaataagtgaaaagcgaaatctttgtgggcttcccaggcaggaaagggcactggaaagagagacaagacctcgagcaaaacaaagcaaaaaggcagcagaaaactcaccaatatacttgcttctttagtttatatttctaagttattttgtaagcttacctcatctcacctagcaattcaaatcacacacaaaaaatacagtgaaataatacgttagcacaggaaaactagaattaaaaaacaaagtctaagaaaaggcctcacagtgcttgtgctgtacacaaatttcaatattaaggaaaacttttctttaaatctttagagtttttacaagaggttagccagtgctccgatgctgtgaaatagtacttattatttctggagtttaatatgatgttgaccctgcatattttatgactttgatttttgatgaataatttaaaactatttttagaagaaaatatttatctctaacatctaaaaacttagagaaacaggtatatttttaaaagaatacatacctgttaaatggtgtttttagcattgatcagaactcaggcaaattcctgttcaaaagaacaaagcacaacatttatagggagcttagttttcagtgcagaattcatatacagatttttttaaaggaagtaggtttttgttgagagtaaaaggtaaatattgtaccaagacagaagcaaggataccagaagccgtaattgatactgaggaaatatgagaaaagtagatatttcttaattcttcagttcttttcctccaaattggaagggcagaatgggcaagaatggagctggacacacaatagtagggactatggcacgccaaacttgcttcagacacagctagttaattttgtaagtcttaaataatactagaaaacaagcctctttcaaccttttctccaaaaggttgagagttaggacaaatgtaaaatgctgcttaatgggcacaaataaaacaagaacatcaaactcatttcacttagtgtcagtcctgatgattcatcattatggtcagggcgaactctggtctttgggccgaaacaattttatccattaaaaaaaaatccagaatgttccagcttgaatcttatatccttagggttacaatattgaattccgaatcgggaaacttaatcttgcagccagatttgacaagatgctggttgaatggtgggcagaagtgatgattgtgggatgaaatgccctaggtcagaatttgagaaaaataagagattttgtgaaagtttggctgtgatataagaatgccaagtttgaaaatttctctctgttcatatcagcagatggtgttccagggtcttaaaagtaaatctctgctgtattcattttctctgtttcaatatttcttgaacaaagtgagtctttacacattcttaggtgcatttcttggtgtatttctagaactgctaatacaagaggtgtttgtagtaatattcagaaggtttctgggaacgaaggctaatatggctcaaatcccaaacagtcctacattgttcctaggtaatatattaatcctcaattcaagaactaaagttgtgatttcttttctgaaaacttttttcatttgtaaacaaacctatatctagattcctagtgacgaaagaatttagagtaaaaatgaaaatgaggcagtctagcaatctaattcattaacacacacgcacactcacagacatactttaaacattttgggaatacttgactatttaacctctaataatctaaaaatattttgtctctgttttcaatcttagtacctgaaaaaattatgacagatgtttacttaaaatactcctctcaacttggttgagaatggaaaaatactttgcaacttttttgtttttgttttgagatgaggtcttgccatgttgctgaggctggctgtgaactcctgggctcaagagacgctcccacctcagcctcctgagtagtactttgcagctgttaaacatcaagtttgtggtaagaattcgagtacatagtcgattggaaaactgcaaacgtatgaatattgtggttatttccttccaaaaacaggggggctctttggtttgcaatgtactgccatttgtactagtgctgaaacctatcaactgcaattgctttctccctttctacctttatttatcaaatagaatttaaacagctagttcaggcagagagtggaacatctgagtaaaagtgacagtacatgaacgcaattcttatatgcacgtgattgaagtgagttaattacatggtagactcctatgagtatttttgaattttttactaaaaaattataacagtaatttctgcatatggcaaaccattgcaatagcacagaataatataaagtggaaagtaaagtatcctgattccactcgccacaaataaccactgttaactatttcttatatatccttccagagattttctgtgcatgtatatgcaatccttacacaacccaagtagaactatactatacatagagttctgcaacttacttttacatataaaaaatattttgaacctcttctcatgtgactatgaatagatctgcatccttctctgtagtactcccttttatggatatacagtgatttatttaaccagttctctcttgatctagcttttaaaaataagttagtctctgcaatcagtctaacaagtagagaagtttcatttctcttaacataaaagatttcagaattttccaaataggatttgtttgagcagaagaactcataaatagtgtctcctgagagaaggttaagtgtaatgttaaaagtgaagagtagctttatgccacaagaaaagatacttatcatctatatattgaatactcaaaccaattaaaatagcaataaagatcacaatattttatttagtaacaaagaggtaagaatgacagagaatggcgtaaagagctggttctcagtcagacacactgtgacttgaaaacctttatgtttgctccaagccaccaaactcaactgaacaaaatgcttgttattttctttcatgagcctcaatgctgtttattaagataattgacatagatgtatgtttccaatgcatgattcagttagtgtatctagattagtgaaaaagagaccagaagaaattcatggtaattaatgtcagttaaatttctgttttctgtatttcatattgtcagaccaatccttcaaccctgattcataagttaaataatgcagtcacaagcagggctaaataaaaacatgtaatgagacttagctcttgaattctactaatttagggttctgagaaggtagacaaagtgtacattattgaaatattccagagaatgtaaaaagttatgttttacgtttcttttaggatatgtctctgctcgttctctttaattacgtcacctcacatatactaagaagacagtaacgtaggtggtaatgaaatcttatatttgaataaaagatgggagtgtgagctgaccatgccatctttccctacacagacttccagaattgagcctatggaactgtccattgggtaggtgtgttctttttccctcttgtttcttccttccagatgctaagacaagtatgcttcatctgtagatttaaaggtagctggcttctttgcctggagcttaaaacgggcttttaagaacaaattgcagagtatggctttaatattaatgatcttctttgaaccccacagctttagaagtaagtacagatcatcatccccattttatagaagtggaagctggctcagagaggttatgtgtcttatttgtagccatattgctaaggagtggaagaaatgagacttgaactcatgtcattttctaaagtttcactgtttccctctgcctgccttttagaaccaccaggggaaacctttaaaaatctactgatgtgaaggactcattctcagaaattctggttctatttatctgggtggagcttgggtattagtatttttaaaaagctttacaggtgattctagtgcactctatacccctatgaaaattgaacaatgtaacccctcctgccccccgccaatcataaatcaacagcagaagaggaatggagggaatgtagtctggtattcatttcatgtatccctgtgtgtctgtgtgtgtttcagtggggctgttgtaaactttcttgaatgtctaatgtttaatactatttttcatccagaaaagggctaaatatttacccatccaaaaaacaacagtagtaataatctaccaataagtgagcacttactaggtgccaggcactttgctggtataatttaatcctcacgccaggtctgtaaggtaggtactgttgttatttccattttagcaagtagaaagctgaggctaaggacgtggcgcaaggccctgcaagacagtaagtggcaaagttggaattggtccggagaatgctggagaccaggtataaatccttaatcatatgcaaaatcacacaattgaaacatggccgtaacattacctgtggaaagtgtcatctctttatgaaagctgatttcattacagcaacatctcatttactccctccctgacttcctccttcctttcctctttttcctcctcctactgttgccatcaataactgttgtacttgggctccaaatggtgtcctggaagatgatccttttgtaaaatgtaaaatggtagacccgttggggagtggaagggtggaggagcaaatcggtgctctttgatagctttcgtcaaagagctgctcctaactttgaggctaggagccacactagcctcaaatagttgatgtcccaatcctccatgagctatgcctttagatgtgtccgacttcaaatacagtgtcccaagttattttcacaaataagtttgtaagtgccccatgtcacagtcagatgcctttagacttataaagtaatctgagtacagagatgtataaattctctgaataaataaattattcttttgttaaataataattatttaattgtttaataattaaaactattcttttattaaaattatcacctttagtaaatagggcagccataaaacaaataagatcaaaagctaagatggtttcataagtgacataatagaatagatatttgggattataaaatagcatttgagagaaatcacaccttttcatgatcagttttaataatttttgcaatttgcttcactttgtttctcaaagctggaagaaattttttagggataaattatttgagtgactttaagaagtgatttggaaatatctgttaaaagtattctttaactctcatttctgcatatgagagtttacctattaatgcatatagaggttatacaaataaaatatatcctgagaagtaagatatatatatatatagaaagagagacagagagagagtagtaggatattaggcactgttctgtgtgtgtttgtgtgtgtgtgtgtgtgtgtgtgtttgtgtgtgtgtgtgtgtgtggaaaattcccatgcgtaatttcaggaaaggcttgaaaacaggttcatatctttaaaatgctgatggagtctgaactatttgagattcatagcctcaggaactcttttatcttttgataaattaacattctgtcaatcatctatcatctgtatatctatcatcttttaactgattaagattcttgcctaaatttgaaatcaaattccacttatttgcaagataagtttgttttctccatccattcttcacaaaaactcaacaaaattctggccaaatatatgttggcacttctaaattcatttttatgaaataattgtattgtatcattaaggattatggtgatatgaagtcagaggattctaccaaaaaaagtatatcttaactcaaattttggaaaacttaaaaaaaatcctgtggtatttctcatattttgaattcaataaagggcatcttttatctggctgttttcaactaacctttttcctgtcaaatggcattttaaacattgtggccctggagatggagtggggctgaaaaagagaactttctttctacttagtagtttgaaatgttcacaaaatgttatcttatttacatttatgtgttatgagtgtaaggccaaatagagtgtactcctaaatatctcctttcgcttttacaaatgattcagccatgccagacctcatggatatatggttagaaaacaaaatgctgatttggtgaaataaatcaacatgatcttcaacaaagcacttactgctttggaacatcagaagggaacataatgcttggtagagacagcgttgttctttttctttttttgtctggagcctgtaatataatatatcttatatcttgtaccgccacctctccacacctgcatccctcctttcagtgatcactctgaatcacagggaggggacatggtcattgttcaaacagataagctgagccttgataccatctcctgcaagagcccagcaatgcgggaaattgggttgaatcttttgagagggagtaaaagagagacgtgtgctagaatccaacacagtagacaaggatacgagttggagattttgtgcattaagatcttggtaggttttctcgtctattcacatctcccttccttcaatatttcttggtggttttctttctttctagttggaccaaatctttataagaaatagagatttgaaggaaatattgaagacaagagactatgctgccccctggttatttgcttaaagtcagcacattaacttgataccatagcacaaattatgggctcaaattattaatatgtttatgaacaaatgagcagaagagtatgtccctaacttaaccaattattatttatgtttaggaacaattaccattatacaataataaaaagataaatacatgcctcatgcactcattttattctattagagtttcaagggacaataaataagaccctttctttaatttcttagtttgttttcatttaatacttataaatctcattgaaaaccgtggctttagacctgcaaccaaattggtttgctagcatcttgtgccctgcattttgatcttggtacagtctaccagtggaaagtttgggtctgaggaagagacccatttacccagggtttctgcttcctactgggagtgggacaaagaggaaaaagatcaaattcacatataggactagaggccatgaatgtcatactcttgtcatgcaccaatgtaatacagaattgctcctcgcatgggtgaaaagtatgttcacatgaaaacctgagcccaggggaacagagtgcctcctcccacctttctttatctggacaattccttccagccaatttttttcaggaaagagtgatattggtgtattattgaggccattgccagactgaaaatccaagcaaaggggcttgaatagaatagaattaacggctctttgtattttcagtttagactggtgcagagatgtttcttttcctttcacttctctctctctctctctctccctctctctcacatctctatctttatctgtctttaactgtataacattttctcttctctctccataccccctccttcccttctctacaatggaattggcccataatcatctcagaacaggtgaagagttgaaagcattgctagagaccacacaggttgttgttttctcttcacactcagcatcttactccttccccttatctcctacttcccatacaactcctaagtctctctagaggtatgtcctggcctgtagcgggagctcagtgggcactatggaatgactgcttcgttacaactatcactctcctaatttatacctcagtagaatgctcgtctcaagtggttttgaagcctcaagttgcctttgctccatttgttccctctcaacattccttgtctgggaatttgttttttgcgctctgctcctagcttcatttcagagtgtataaatgaggctatccttgaaaacagtcattttctattttcatatgatgtctaaaaggaaagggcttctcagccatggttccttattcatactgcataacacgtttaatttaagcagccaccaccatggtatccagcagatgcttatttttaggaagtcataatgttgaatcttaaaacgtgaagaggggacacgaggttctttgtaacagatcttaaaagacaaaggggagtggagaatgaggacacagagtttgtgtttcaggagtttacactgactagattttaagttacatggggaccagataaacaaggcatgaccaaaggagcatgactgaaaaacagcttataaagtcaatatcattgtcttcagggatttcatgaaaatattcttctatttttttgcggcaaaaacaaatctgaactaacgctttgccacctttaaaacatagtctctgaaatattactccgggtggaaatattgtgttactattcactttagcaatgttttatgcagtacaagtgactgtgaataattttcatttttctacagtctgggaaatggattattcaaatcaagttttaaaacttttaatacaaaaggccacagaagagtatgttaattggcagcttcatgcgtacttacaaattgacaaagttaatgaataataaaatataatgaataaagagattattttggtagtacttggaaacagtgacttgaggttaggatctactctagttggttcttgaataatattttctcaaaataatgtgtaagtaaagttatgttaatggactattttttatttctgtgtataaagataagcaaatagtaatatttgatcacttgacatttaattttttcttggtttttcagctcagttttcaacatagtagtgaagcttatttatacatatacatatattcctatatatattctttttaatgaaataagtattgctcttctgtataagaaattaaggaaaaaggaatataggcaaaggtaaaaagaaaataagattttagactagatcagtaaaaaatgcagtgttgattggtttcatttatttgaatgagtgtcatgcataacggttataattttcaagttttaaattaggattgtgtaacattataaagtataaaatggtatcttaaaatgtcagaaataatgtctgagactgaaatcgggatttctcaggggttgcaggtttaagtttatgattccagaaataacctaagggaaaatctgtctagcacttgaactgacactgatcaacactgatatttgaattgcaggattttaaacacacacacacacacacacacacacacacacacacatcagtggttcatatttgtttttttaatagtatatggaaacctttttttttggtcttttcacaagaagtcaaaacttgtgaaatgtgtaaagtactccaagtttaatgcatcaacgtagcattccgtggaagaagaacatgcctggtgttctgagtgcgtatttcggagcactggcctcttgctggtccaaaggagtaacatgttctcaggggcttgagtttctccctttggaggcaaaatttagctcagtcattccttagtacctttcacagctgtgggtaatattcattttcttatctctcctagaagtgatttttccacttggttgaacaaaccttttgtccacctagaattcaaaaagtctgaggctaataaaaaggcgaacccgtcaattttgttagtgccaactcttctttgttattctcaattttcctatattcattgagctttggataaatatcatgtcatctctttctaaaaaacatgggaactccaagctgcaagagtgctacctgatgtgcctgagtgaataaacaacctggaaattggaaacagacagcagagtgggatgggatgggtgtgaggagtcactcagttggtcaggaaagccaggcagaggttttgcaaaacagtgttgtgtcatggtggtataatgactggtactcggtgggtttcagaggaggtaagaggaataggagggaggcgggagaaacagggaattgattctgcaggtcccagaggaggaagggaaggataattctgcatggaagaactaggaaaatccatttgccaggacaaaggtgcaaatgaggctttgggcacagaaaaaaagtgtctgccagtttgttgaacccagggcatgggggcagagtaggactagaggctgacatacatgaatgctcctcaccatgcccgtgacagggttggtgagcagagctggggagagggttgagtctggaggtgctaatcagtgacactctgaataaagaagagttgtgtggtcagagaatccagctggctctgttttgttttccccacttcccagttttctttaccactactcttcccctccctggttccctggttcagtccctcctcacttcagagctctactttgctctcctcactccttcagttcccattccaattcacaatgccctcaattccagataaaacctaaaaacctgccattttgtatcttgtcattctgctcacccacccactaatgtggtgaatttaaactttctacaacctgctgccatcttacttccccagtccttaacttccaagaatccccattgacagactgatcaactcagatcttcttattgaaagcttttcaaacatttccccagaagaaatccctggaaagccatgtattgcagaaatccctggaaagccatgcatattcattatattgaccatagaatttgaaacccaatgcttaatttcagaggtgtcttcttcatagctcaatgttcctccattacttgtgttttaaaaagggatcaaaagtactaagttgctttccagagattccttgggaattcatgaacatctatccattctgtgtcttggagaatgattagaattatacaaatcaggacaacttaattagaaaagatattgttaaagaagctgtcttccaagaatttgacctctgaaacttgtccttctcactggcccactctctggcatttgtttctcctgcatcttcaaggcaatattgctaagtggttaagagaggactgaaaatgacacatgtatacaaatgtaacaaatctgcacgttgtgcacatgtaccctaaaacttaaagtataatacaaaaaataaataaaataaaattccctttgtgatgaaaaaaaagagagaggactaaaatatttgtttggctacagagggagaaattccctcagtccttgtagaattataaggtcccaatgaataattttttattagctacttgaggcaggggccatattttcccacagtctctagcaaaattctttatgagcatttgaataccaggcccatcaccttttatagcttttataccttgcacaacttagctcctctgtgtttcagttcttgaacagtgaagcaagagttataaaaatcactacctcagagggttgctgtgagaattacacataagataattcatgtagagaatgaagcacagtgcttgactcacagaaaacactacatgtacatgagttaatctgattattgccacccatttacttcttgtatctatcctcacattcttgcttcttcagtacttaaactttccttgtggaagaaatggaagtgctcatccatctttgccttttgtgcaagatattgctggtcatgcttcttgaagctccttagtaaggggcttggcttttttttttttttttttttttagacagaattttgctcttgttacccaggctggagtggaatggcgcgatctcggctcactgcaacctccacctccctggttcaagcgattctcctgtctcagcctcctgagtagctaggattacaggtggctgccactatgcctggctaatttttggtatttttagtaaagatggggtttcaccatgttggccaggctggtctcaaactcccgacttgaggtgatctgcccgcctcggcctcccacagtgctgggattatagatgtgagccactgcacccagctggggcttggcttttttgaccctaaccttctactcccagttttcttacctctcttctatttatttaacttgctattgcatcctccttctctccagaaagagtcattcccaaggtttgctcacaggttcttctctttcttcagtattcccatcagctttagtaactccaactattatttctatctattctttcatccacttgcagccttgaccacttttttagagcattatctacctagaaaacatccatgactttcccttcacaagcatcatgttggatgctaaaggcatctttcctacaaatccactccacctgaaagaataacagcacttactttttacttttactgtgtgccagactgttctaacaactctgcttgtatatctatttcaacatgaaaaagtggcaaagttgaggttcaagttcaagcaggcttactctatgtttatacctcttgacttgcttatatccgcaaaggctgacagccttccattcactgaatcttgggccctcagtcaccttgactccccccacctttaatgaatggacagagcacatggaatctacctgggttgaaaaatctctttatccagtcttgctccaccctcccttccagacttttgttcctcttgcctgaattattgacataattcctctctagtcttcctgttcctatgttttctgtacatcagtgaccttcacacatttctttttttcaaacaaatttaacttcagaagccccaaatgtagagcagagaaaggcagtggggctctcactgaaactgggagaagaacccagatttccacctgctctgtgttgactttgttcactattgagccagattctggataatttcctttagacatggcttggaatgcattcttccctattctgaaacatgaggtcatgcaaagccccatcctgtcttttcctggtttgttttttttctttcactcctccagttcagactctacactctagtctaattgaactagactactcacttttctcaaacatctgcagtttctttcttccttatctctgaacttccacaacaatttgtgtttacttaaatcttgtccatccttctgaagcaatagctcctgcagcaatcttctacctgtctgcctgaaccagcctggcctcatctgaatccttagagcacatcgtgcctctttttggcatccacattctgttttcttttaggggtattataagcctgtgttctatttccccttgatgatgacctctaggggattaccccctatgtagatatgtgttcagcacacagccttgaacctagacccaccaaacacaaacattggcagatggtgaaaaaaattcattcacccaacaaatgcttattgagtatttgttaagcaaatttcttagccctccagatacaacaaggtcccagctgttatggactgatggcacgtatgggtatatgtaaacaaatgtgataagttgctccttccctgaagaaggatgaattttatatagttttagaatttttagaggaaagagattatcaagtccaacagacccaagacccttgttttaattcaaagagattaactgatttgttcaaaggcagtggccaaacctggaagagtcctgagtcctgttctctgggcacttacatcacaactctcaagccacttttgactggtctctaagcataagatcttgttggtttagaaaaatgggaaaaacagagaatattctttgcaaaattctttttatatgtacatttattttctccgaagaatttttaaatgatcaagtcttttatctttccctcctctatttatctctcctcaagccccttttcaacagtcatgtgaacaatatatgcacttaattattgctttactcctcattgcagttaataaattacctgtgacatctcctagaccttgcaagttcccaagattggggtggtggagggaatcttctcccatgttctctatcaggtacattctagtttcagctgtcctatgcgattaaagtgtacttgagtgaattttaacaagtcaggaagatagggttgcagtgctcaggtcccaatgaaaggagtttcccaatgagagaagtttacatcacatacaatatgatctcatttttaaaaatcatacctatatgtagacgtacaaatattttgatatttattgagatgtcatgggatacataaatgccattaggagatctgaacaaatttaaataagtattgacatgttctgtaaagtattttcaatgcaaggagaattttaggaaaatttaagcagtaaagatattcttggtgttaatcacattttttttttttttgagacagtatcttgctctgtcacccaggatggagtgcagtggcatgatctcggctcactgcaagctccgcctccaagttcaagcaattctcctgcctaagcctcccaagtagctgggactacaggcgcctgccaccacacccggctaatttttttttttttttttttttttattttcagtagagaccaggttttaccatgttagcgaggatggtctcgatctcctaacttcatgatccgcccgcctcggcctcacaaagtgctgggattacaggcgtgagccactgcacccagctgttgttaatcacattagttgatataagggtgagttggaagagggcaagggaagaaagagtagaccaacaattatgcttaatgactcaacagtggagaacatagcaatgggctatgttctttaggagtcagatgctggagttaagtagaaggcattttgggatagatcctaatagcatctcccctatacaggcttctttacatgacatttgaaaaatgtggaatatactgtttggctacagagggagaaattccctcagtccttgtaaaactgtaaggtcccactggatacttttttattagctactggaggcaggggccatattttcccgcagcctgtagcacaattctttacacatagtaggcactcaataaagatttgtcaagtgtatgaatgcacagggttttcataaaggcatgatccaaggctgttcaggtactccatttttatcgccattcagaacttacagctcccatagcaacaataacttgtacccctcaagcatatgtagtatttagtatttctgtatgtggtgtcaactttcatgtcataatatactatatgtgtaactggttaagttactgttgttgtgggaaccataggctttttcccacctaaaataagcccttgctagccatccttgtctatgcagaggtgacaactgtacaatctttccatgcctaactcgtctctctgaccctaggcctcctgtttggtcgacatatccaatgacaggtttacgtgctttttgcaatgacaatgctgtgcttaatagtcttttttgctagtaacgctgtgacattaatattttgaaagcccacttttagatttattattgctttgttggggcgtaccatttaattacatgtacattttgaaaaggggatcaattcaacaatcagtctggttatgagatgttcctaggcacgatggcacagaacaaatatgttgtcttatcctgtctcatgccaccaaagatgaaatgtacttgcttttttccctaaagtaggtactaaaactttttattttctgttcataatgagagattttttagagggagcttcttgaaacctggaaaaaattaccagccctcattttagttcgttttgtaattcatctttgtgaatggcaagctaaggaaagtggacagtggacagtcaggggtcagttagggtaactcaagtggagttaaatgcttctcctctccaggtgccagcaagcatgtttggggggacattggagcacactgtttaagcagattggccttgagccagcagatttctgtttgtgttacttgaagcttatagatatactcttgggaaaatcctcagaatatgcgtgcttttctaaatgggaagcctcttactgtttaacactgattcacttataaggcttttacttctagcgatcacttggactgtctagtgaagcaaatacaatatttttaccaatgtttattacacaacagccactaatatcagactgctctccactgtctatcttctgctaaatgttctcttcatttcttctacatctccaccctctccattttctcaacatacccacagacacacacacacacacacacacacacacacacacaccctcccaacttacaatgagatattaatctctcatatgcattcatagccctggcctcaagaccaatttttgtttctcccaatgctataaattgggtcactcaaacatatttgttgaaatggaacaaaaacactctgacattttgtttatagagtatctagaaaagatcagggtcaacagagacttgacttcccactcctgtcctttttgtatcttctctgccccatgcagagggtctcctgtgcactgttggtccttccttatcaatcacgtggcctttccttttccttagatctcccaacaccttggtccttggcaagcaaaaaatgacctgcccagtgttgtttgttcaaataatctgtaactgaattcatacctaggtattaatatgtgagtaaacatgcagtatttatcgtttaaaatgagtttcatggcattacagtatattatccttaaagataaatttaatggtggaaatttcatattgggaagatgagagagatgtttttgagtgaatagttccttaccttttaacctgtgtgacctatcaggttacttttctaccttgatgttcttgattgtgcctgcatagttggtaaatagtttaaaatgacttatgggtatagcagcattaaatttccataatgagatgaaatatactagaaagatcattctttgacacaggccattttgatttttttttttgcattgggttagagtttataaacaaagagttgataataggcgatatattatttaattcatgtgatttttatcgagtacttgttatgggtcaggcatctatcctggggatagaagattactaagataactgtggtccctgttctcacctagcttgcattgtagacaagcaaacagatgagaaacaagtaaaaaataaaaggagaatctcaatttgtggtatgcaccagaaaggaaatgaaaattattactaagctagtgaattatgattgaggatgggaaatctactttagatgaggatatgtgggaagaccatgtctgagctctctcctaaaggttgcatggtcaacctgttgaccacggctggtgctgccatgggagaaatggtgataatggtggtggtgatggtgatggtgatggtgatatgatgttgatggtgatgtgatgatgatataatggtgatggtaatggtgatggtgatgttggtgatggtggttatgtgatggtgatagtgatggtgatgtaatgatgatggtgatggtagtgatgtgatgatagtcatggtgatgtgatgatagtcatggtgatgtgatgatgctgctgatggtgatggggatgatgatgtgaatggtgatgatgatgttggtgatagtgatgatgtggtggtgatagtcatggtgatgtgatttgttggtgatgttgatggtaatgttgattataagccacaatggggtttaaaactaacctgtggtaaaaataacagggctatgtcaaatgtaactccttgacatgttatcaaagaagacctagaaataacagacaggatgatattaaataagttgtttagtcttacctttggctttaaacaatttactcttgaatgtacactttgtggcaaaggagcaagcaatacttctagagtttacgcattttctttgataggtaatgaattctaggagaaacaaagtgattactattactctgctcttccttaggcaaaatccagagattttgaaaccagtttgttaatataaggttgattttgccttgaggttagtgatttacaagttttgttgttgttgttgttgttgttgttttcgagacagggtctcactctgttgcccaagctggagtgcagtggcacaatctcagttcactgcaatctttgcctctagggttcaagcaattctcgtgcctcagcctcccaaggggctgggactacaggcacgtgccgctatgcctggctaatttttatatttttagtagaaatgggtttcaccttgttggccaggctggtctcgaatctgtggcttcatgtgatccacccacctcagcctcccaaagtgctgggattatgggtgtgagccaccacacccggccagtgatttacaaagtattaaggagaaaaataacattttagagcaataaactgattactgacttactgctttggtaatttattgatttgatcagtttcttcaagtgactacaagttgtttttcccctccggggaatttttgaattttttctgatgcatatcttcttcccggcattgccctttcctctcttccttttcctccctctgctgccaaaatgtcctctgcatagaaatatgaaggtttcctttatgatttagtattaatgttagactatgaaaagagcgttttaaaatttgctgagttgctgttagttatactaagactcattcataatctgtgggacagcacttgtggaaagccaacacaatttagttatcttcgtttccgaatctggaagactttaatgacatggaaagaatctcagttatttagttaaccagacaaagcagattgtagtacatttgtactacatgcttctgttttataaataatacagaaagatgagatgcatatctaaatatttatggatgtgtacaaaaagccatcaaggacatactaaaatgttaatctcttgtaggatattttgaaaacattttcttttttttttcctttttctaacttcaaaatttaaattctaaagttcaaaggcaaaaagacgatttttgaaataaaccacaaaaatagtaagttgttttcacctttgatctagtaattctacttttaggaaatactcagcgacctggataaagaaattatattagcactcacacacaaaaaggaagcatctgatgtcttaaaagaaggaagtgattgggctggtcacggtggctcatgcctgtaatcccagcactttgggacgctgaggcaggcgatcacgaggtcaggagatcgagaccatcgggtctaacatggtgaaaccccgtctctactaaaaatacaaaaaaaaaaaaaaaattagctgggcgtggtggcaggcacctgtagtcccagctactcgggaggctgaggcaggagaatggtgtgaacctgggaggcagagcttgcagtgagccaagatcgcgccactgaactccagcctgggcgacagagggagactccgtttcaaaaaaaaaaaaagaagggagtgattaagcatattaaatccataaatcatgtgacgttacaattgttttcaaagaaattgacctgggtatatgcttatgatataatgtgtaatgttaagtgaaaaaaaatagcttatgtagtatggttctaattatgtaaattttaaaagtgtagaaaaaaagaccataaagaaataaccaaactttcggcagtgataatttttaggtttggagaatcatgttttttttaacttttcaatgaatagacattccgtttaaaatgagatatacatataaacgtttatatatatttttcaaagaatcagaataaaatctctgataacaattcatcttgatgttttggtaataataattgggaaggcctagaacatattccttttcactgtgttcacccagtgccttaaggaaacaaataacaaataagagcctccaatttcttggacacttcttatatgctgtttaaacttcacagaaatatttttaaaaatctcaagctttagggagttggattataaaagtagccatagcttggacatattattgtcaatatgagtattaggcacatttgattatcaatacagtcaactctactcagttggtcagaactgttcaatcagattgatagacaatagaagattttcctgtttccttgcattctggacattttgaatgagaatttgttccactaaattggtgcctctgttaagctccaggacaagcccagtgaatgagctgactcaattgtttaggcatctttggacctctgagttagaggaagaaaactgtggactagtagtgcctgtgcagaggaggccctcaataaataaatgatgggcacctaaggcacatttagtcttgtccgcacttcatcccacagtttaacctggaaagttggtactttatatatgtatattatttacatgaatgatacttgtctgggactaaaaagtaaaataggagaagtagttgtattaacagtaataaaaatatactgaaaatcagggctgccaattattggtccacctgctgtgctccgggccctgcaagagatcctggcatttgtcttctcgttaatgtgatgccgccctgatttgctataggacttgccctttcctgaggattctaacatgtgaaaagacacaatggccaggctctcagcacatatgatgtctaatgcccttcaaccctttcttgtttttggtctgtgccctgatggttttccatctcatctgtggcagatgagattcaaggtgagagaaagaacaaaccctataaggtaattctgtcactcacctcatcttcataatcttccctgagcttcctctgctgctcaccctggtattgatcgtgtcactggctatagcagaccaaggcagggggctgcaaacctttcctcacaaccctcgccagtgcgcctgtttcagctccaagaagaaaagcctgctgtgaaaacaatcagtgcatttgctttagatctaagtgattccaactaggtcgatgcttcatgctgatgtgttgaaaacatttaaaaaatttctcagagtttgatttccacgggaacattgtggcatgtgtctcagtgtctacagttgttatttttcacgaatgcagccgacaactgcttcctgccacagcacacaaaagcagtaggaaaacggaggcttttgtctggatggatatttactataaatgctttctggggaaagggagaaacctgtgtgtgtgtgtgtgtgtgtgtgtgtgtgtttatgttgtgtgttgtgtttgcgtgtgtgcgtgcaggcatgtgtgcacgtgtatgtaggttgggttgatagccgcacgctatcttgacctgccgtcaaagaggtttttgttttagtttttgtttttttcactcctgaagtgagtaagatccaatgttgatagggtataaatgcaagagaatggactactgtctggtttgggtttgagttttgagatttcctttgttttggcactgactttcctagacaaataattcataataatgccaagagttgctttatcttctaaaggatctaacagatctctgcaagtttatgtttatatccagaaacaattggaccttttcatcatattgtggcatgcagcagtaaaatggacattatgaaagggagctatcctcacacgaattcatatgtatttaatctctgacagagatccaggataatatttaattgtagaatctaagctaacaagttttccacctgaaaagtaatctctctaaagaaaaggaatgctgtgccagcatgtatgtggtgtattgtggtattggggggacatgataaggggtaaggggcccagtctaacagtgttggagtcaggggcatggacaagcatcttacacctgatcacatttttaagtccccattctagttaataatacagttgggccgggcgcggtggctcacacctgtaatcccagcactttgggaggccgaggcaggcagatcacctgaggtcaggagtttgaggccagcctggccaacatggtgacaccccatctctactaaaaatacaaaaattagccaggtgtggtggcacacacctgtaatcccagctactcaggagggtgaggcaggagaattgcttgaacctgggaggcggaggttgcagtgagctgagattgtgccactgcattccagcctgggtgacagagcaagactcagtctcaaaaaaataaaaaaaaatgtagagcctagaatttgttttaaaaatatagaacaatgtacctacaagccacaccttcaaaattacttctttatttagagataaagtcagagagctgacattagggcttcttattttcccatgtagctccacggaagatctgtggctaagtcagagtcagaacctagttgtttagtgttctgtctgccaagtcctgtaaaaagcatgtgtgtcatttcagctgagttttctttgcaatgtcatcatttaaataaaatgttggggttttcttctaggcatgaactctcttgggttgtgttaccctgtttgctgtttactgtcaagatgctgaaagaatgttcttataatgatccaagaggaagtggcaaatgagtgctcttcttcaggtattttgttgatttttcagaatgcctaccaataggaaatttccacaaatttataatctgtgagtttattgtataaaatcggagggaaataattgtcatgtttccttgagtcaaatgagtgagattcccttatgctctgatgtgctgcttctccaaaacgttagatttattttatgccagaattattccttaattcataagctgtatccatgggtggcattacagtttgttttactgaacacctacattgactatatatctctttccttactgtttacgtatttgaccattagagtttatattctaaatacaagctgcacataaataatcttttatggaattttatttgctatttttatatttcattttaaaaaggtagatgtggcttttatgggaaaagatactctagatttttgagtattacttgacacttctatttcgagatatctgcaattaggaggcttaaagtattttggggggaagttgggtcagtaatacccacagtttccttatgaagaaagtgggaagaaaatttcagtggaatgtattctgtcttgaaggaacagaaaacttgaaaggagacctaggtcactgatgatgggtctaggaacagaatttatctccagttttctaattgcttcttttaaattagatatgtacttttttttcttattatactttaagttttagggtacatgtgcacaatgtgcaggttagttacatatgtatacatgtgccatggtggtgcgctgcacccactaactcatcatctagcattaggtatataccccaatgctatccctccccactcccccaaccccaccacagtccccagagtgtgatattccccttcctgtgtccatgtgatctcattgttcagttcccacctatgagtgagaatatgcggtgtttggttttttgttcttgcgatagtttactgagaatgatgttttccaatttcatccatgtccctacaaaggacatgaactcatcattttttatggctgcatagtattccatcgtgtatatgtgccacattttcttaatccagtctatcattgttggacatttgagttggttccaagtctttgctattgtgaatagtgccgcaataaacatacgtgtgcatgtgtctttatagcagcatgatttatagtcctttgggtatatacccagtaatgggatggctgggtcaaatggtatttctagttctagatccctgaggaatcgccacactgacttccacaatggttgaactagtttacagtcccaccaacagtgtaaaagtgttcctatttctccacatcctctccagcacctgttgtttcctgactttttaatgattgccattctaactggcgtgagatggtatctcattgtggttttgatttgcatttctctgatggccagtgatgatgagcattttttcatgtgttttttggctgcataaatatcttcttttgagaagtgtctgttcatgtccttcgcccactttttgatggggttgttttttcttgtaaatttgtttgagttcattgtagattctggatatttgccctttgtcagatgagtaggttgcgaaaattttctcccattttgtaggttgcctgttcactctgatggtagtttcttttgctgtgcagaagctctttagtttaattagatcccatttgtcaattttggcttttgttgccattgcttttggtgttttagacatgaagcccttgcccatgcctatgtcctgaatggtaatgcctaggttttcttctagggtttttatggttttaggtctaacgtttaagtctttaatccatcttgaattgatttttgtataaggtgtaaggaagggatccagtttcagctttctacatatggctagccagttttcccagcaccatttattaaataggaaatcctttccccattgcttgtttttctcaggtttgtcaaagatcagatagttgtagatatgcggcgttatttctgagggctctgttctgttccattgatctatatctctgttttggtaccagtaccatgctgttttggttactgtagccttgtagtatagtttgaagtcaggtagcatgatgcctccagctttgttcttttggcataggattgacttggcgatgcaggctcttttttggttccatatgaactttaaagtcgttttttccaattcagtgaagaaagtcattggtagcttgatggggatggcattgaatctgtaaattaccttgggcagtatggtcattttcacgatattgattcttcctacccatgagcatggaatgttcttccatttgtttgtatcctcttttatttccttgagcagtggtttgtagttctccttgaagaggtccttcacatcccttgtaagttggattcctaagtattttattctctttgaagcaattgtgaatgggaattcactcatgatttggctctctgtttgtctgttgttggtgtataagaatgcttgtgattttgtacattgattttgtatcctgagactttgctgaagttgcttatcagctgaaggagattttgggctgagacaatggggttttctagatatacaatcatgtcatctgcaaacagggacaatctgacttcttcttttcctaactgaataccctttatttccttctcctgcctaattgccctggccaaaacttccaacactatgttgaataggagtggtgagagagggcatccctgtcttgtgccagttttcaaagggaatgcttccagtttttgcccactcagtatgatattggctgtgggtttatcatagacagctcttattattttgaaatacgtcccatcaatacctaatttattgagagtttttagcatgaagggttgttgaattttgtcaaaggctttttctgcatctattgagataatcatgtggtttttgtctttggctctgtttatatgctggattacatttattgatttgcatatattgaaccagccttgcatcccagggatgaagcccacttgatcatggtggataagctttttgatgtgctgctggattcggtttgccagtattttattgaggatttttgcatcgatgttcatcaaggatactggtctaaaattctcttttttggttgtgtctctgccaggctttggtatcagaatgatgctggcctcataaaatgagttagggaggattccctctttttctattgattggaatagtttcagaaggaatggtaccagttcctccttctacctctggtagaattcggctgtgaatccatctggtcctggactgtttttggttggtaagctattgattattgccacaatttcagatcctgttattggtctattcagagattcaacttcttcctggtttagtcttgggagggtgtatgtgttgaggaatttatccatttcttctagattttctagtttatttgcgtagaggtgtttgtagtattctctgatggtagtttgtatttctgtgggatcggtggtgatatcccctttatcattttttattgcatctatttgattcttctctctttttttctttattagtcttgctagtggtctatgaattttgttgatcctttcaaaaaaccagctcctggattcattaattttttgaagggttttttgtgtctctatttccttcagttgtgctctgattttagttatttcttgccttctgctagcttttgaatgtgtttgctcttgcttttctagttcttttaattgtgatgttagggtgtcaattttggatctttcctgctttctcttgtgggcatttagtgctataaatttccctctacacactgctttgaatgcatcccagagattctggtatgttgtgtctttgttctcgttggtttcaaagaacatctttatttctgccttcatttcgttatgtacccagtagtcattcaggagcaggttgttcagtttccatgtagttgagtggttttgagtgagattcttaatcctgagtgctagtttgattgcactgtggtctgagagatagtttgttataatctctgttcttttacatttgctgaggagatctttacttccaagtatgtggtcaattttggaataggtgtggtgtggtgctgaaaaaaatgtatattctgttgatttggggtggagagttctgtagatgtctattaggtccgcttggtgcagagctgagttcaattcctgggtatccttgttgactttctgtctcattgatctgtctaatgttgacagtggggtgttgaagtctcccattattaatgtgtgggagtctaagtctctttgtaggtcactcaggacttgctttatgaatctgggtgctcctgtattgggtgcatatatatttaggatagttagctcttcttgttgaattgatccctttaccattatgtaatggccttctttgtctcttttgatctttgttggttaaagtctgttttatcagagactaggattgcaacccctgcctttttttgttttccatttgcttggtagatcttcttccatccttttattttgagcctatgtgtgtctctgcacgtgagatgggtttcctgaatacagcacactgatgggtcttgactctttatccaatttgccagtctgtgtcttttaattggagcatttagtccatttacatttaaagttaatattgttatgtgtgaatttgatcctgtcattatgatgttagctggtgattttgctcattagttgatgcagtttcttcctagtctcgatggtctttacattttggcatgattttgcagcggctggtaccggttgttcctttccatgtttagtgcttccttcaggagctcttgtagggcaggcctggtggtgacaaaatctctcagcatttgcttgtctgtaaagtattttatttctccttcacttatgaagcttagtttggctggatatgaaattctgggttgaaaattcttttctttaagaatgttgaatattggcccccactctcttctggcttgtagggtttctgccgagagatccgctgttcgtctgatgggcttccctttgagggtaacccgacctttctctctggctgcccttaacattttttccttcatttcaactttggtgaaactgacaattatgtgtcttggagttgctcttctcgaggagtatctttgtggtgttctctgtattccctgaatctgaacgttggcctgccttgctagattggggaagttctcctggataatatcctgcagagtgttttccaacttggttccattctccccatcactttcaggtacaccaatcagacgtagatttggtcttttcacatagtcccatatttcttggagtctttgctcatttctttttattcttttttctctagacttctcttctcgcttcatttcattcatttcatcttccattgctgataccctttcttccagttgatcacatcggctcctgagtcttctgcattcttcacgtagttctcgagccttggttttcagctccatcagctcctttaagcacttctctgtattggttattctagttatacattcttctaaatttttttcaaagttttcaacttctttgcctttggtttgaatgtcctcccgtagctcagagtaatttgatcgtctgaagccttcttctctcagctcatcaaagtcattctccatccagctttgttccgttgctggtgaggaactgtgttcctttagaggaggagaggcgctctgcattttagagtttccagtttttctgttctgtttttttccccatctttgtggttttatctacttttggtctttgatgatgatgatgtacagatgggtttttggtgtggatgtcctttctgtttgttagttttccttctaacagacaggaccctcagctgcaggtctgttggaataccctgccgtgtgaggtgtcagtgtgcccctgctggggggtgcctcccagttaggctgctcaggggtcaggggtcagggacccacttgaggaggcagtctgccggttctcagatctccagctgcgtgctgggagaaccactgctctcttcaaagctgtcagacagggacatttaagtctgcagaggttactactgctgtctttttgtttgtctgtgccctgcccccagaggtggagcctacagaggcaggcaggcctccttgagctgtggtgggctccacccagttcgagcttcccggctgctttgtttacctaatcaagcctgggcaatggcgggcgcccctcccccagcctcgctgccgccttgcagtttgatctcagactgctgtgctagcaatcagggagactctgtgggcgtaggaccctccgagccaggtgcgggatataatcttgtggtgccacgttttttaagccagtccgaaaagcgcaatattcgggtgggagtgacccgattttccaggtgcgtctgtcacccctttctttgactcggaaagggaactccctgaccccttgcgcttcccaagtgaggcaatgcctcgccctgcttcggctcgcgcacggtgcgcgcacccactgacctgcgcccactgtctggaactccctagtgagaagaacccggtacctcagatggaaatgcagaaatcacccgtcttctgcgtcgctcacgctgggagctgtggactggagctgttcctatgcggccatcttggctcctccctagataggtactttttaaaaatggggtgactattcagaatgtcttgttctgtagagttttagacttttagaatgctggagataatataatcaattgattccggcatgataatgatattttgcagtgttccatagcataaagaaggcagcatttatgttaaacatggtcccttcctttctattaacggcatttgtctataaacaccaagggagtggagctgctgtaagtcaatgagtggaggaaatagttgtaatatgtcatctttccaacatcatttcattcattttaaaaatgaactccttgggtgtgctgtagaaacactattttactttaaatatactagcaagagccctattcgtaaagaatttatgcacttaatttatgtactcagcttgtcaggttactttgtttccagattttttcccttcagaggaatgagagagtcctcatgagttgcaaaaagaaaaaccataggcttataataagcttttactggctcatgtgtgaagcttagcctactatagattttccagaaaatcaaatatggatgtggcggaaatatcttttctggctaggagaagcgactcattatgaaacaatgaactgtacatctcttgggagtgtctttgagtagttacttaaaagccaatgtttagcagcagaaccttcagagaggcataacccaatgctggcagtgtaggaaagcagctttaaatgaacatttcccacaggagattgtttcagacagggtgtggaaatggcaggtgaatgaaggtctcttccagctaactggaaaagcatgttttcaggagagcagatgctataactataaaaatgaaggtgaacatactgaaaaagaaggggataaaattaattttacagaaatgataacatgttagatgttgtttagcaatttttaatgttaaatctttctcctacgccttgggtaatacaaagacaacattgttgagttagttttaagaacgtctatgtgcaaggcaagtcttaattcacctgataaatccttgtgaaatatgtgtggaatcttatggattcagaaaaagctgaattttttttcattctttgtcaatttatcttttttcttttgtcacctccacatgttgctatagcttagacagcttagacctggaaagaaaattgcaagattttttttttcctgttttctccccaccagacttcctcctaatgtcaaaggtcctgcagatcattctctcacaaatgctggagagctctttttcacagttgactatacaaatacatccttggtgtaataaatgatggcgcctcctacttcttagtttccttttggcaaaagtggaaccgtttccatgaagctgtgccttccttcttgctactgctgttgactcctctattagttggagacaagagcctttgggcagaaggatggtacaccataaatgatcgtcttcctcctcgtggtctccattcagatgaccactgagaatatttatcatcttgcttatggatttaaaaaaattatgtcagtaactctgttagaatattctgttttgttcgggagcagaattttaaaaatatatcaatgcctaacaatttcttattcttagaatttatttcctcttttaaaaaaagatggctattaatggtatgtgtaggtctgattttatgtatatattatatatctgtattatatatatctatattatatctagagatatggtatctattatatagagatatatctataaatatctatatataataatagatataatatatattataatatataataatagatatatattatataatatattatgtataatatataatagatatatattatatgtaaattagatataatatctattatatataatatataatctaatatatattattatatatagatatattatatctatgttttatatagatatattatatattattatatatataatatatctatgttttatatagatatatctatgttttatatagatctacattatagatatatctatgttttatatagatatatctatgttttatatagatctacattatagatatatctatgttatatatagatatatattatatatagatatattatatctatgttatatatctatatattatatatatctatgttatatagagatatataacatatagatatatattatatattatatatagatatattatatatattatatatggtatattatatatagatatatattatataggtatatattatatatagatatataatatattatatatagatatatataatatattatatatagatatatattatatattatatatagatatatattatatattatatatagatatatataatatatagatatatattatatattgtatattgatatatattatatatagatatatataatatatagatatatattatatattatatatattatatatagatatatattatatattatatatattatatataatatatagatatatattatatctatattatacattatatatctatattatatattatatctatattatacattatatctatattatatatagatataatattatgtatagatacattatatctatattatatatagatgtatataagattacctatatataatgcaatatatactgattatctatatagaaaatacagtatatactatataataacaactatttattgaatttccactgtgagccaagtagggttctagtaatttgggatatgatatagtaattccaattcattggtttaatatgtatttattaagtacagcatccatgtgtttgatcactaaactaggacatgggacagaaaggaagacacagtttctgctccaaaaagctcatagtcccattagagagaaaaaacaagatggtaaaataaaagctgtaaaatcatataagcactggagcattttaaaaggttaaaaacaatatagctccccccccgcttacagttcagtagaaaagactctagctaaccaaagtcaaatatttatatttacataaatatgaaacagtagtaagtgttaccatggggagatgaatggtatgaaagctcatcacacgagactttgaccctatcagggaaatcatcagtgagtatatcagggaggtgagattgaaggaggagctggagttgtgtaggtcaagacggcgttaagcgtgctctctgcagatggaacagcgcatgcatagtccctgcagctgaaaggaatgtggcacgtccagtttaagggacttgaagaaggccgacagccactgtggcagagcacagagagcaagaggagtgtaaatgtggcagtaagccagactgtggagaccttgccgaaaatttggtttgatccaaggagctctagggaacccgtgaatgtcataaatgcctttgggaggggaaggctggaggtgttgccctcagatgctcctgtatgtataaggttttacaacttctattttatcatgttgttttttctcccttatgtaactatgagttccttggggcaagaactgtgtcctcttccctatcccatggcctagcttagtgcctaataggtggatgctgtactcaataaatacatattatgtcaatgattttatatcatttacttattcttcttgacttttctttagctattagtaaatacagttttacctaacaatgagcaaaatatgtgcactgggctgcgtgtgaacatgttatgtagatttgttagtgatttatgtaatctatctgggatctgtttactttgtactgctaaatctaattctactgctaaatcaccatctttagtcgctgttattgttatgtgtattatcacaatattcttctaactgttctcctttgtttgcccatgacctattgtcaacccagcagccgtcttatgataacctaaagcagattactgtatccctggctggaaagcatcaggaggtccccatatcacccagagtaggagtcactccgtagagctgcttctaagtgaacttccccacctctctgcctctcctacctcatctactacaagcccccttatccaccctggggtagccataccgggcgttcctgcagttcctcaaacattccaagcatgctgtcatctcagaggctttgaattttgttttctaacccaattatttgcatgactcctttatataaaacattccaaaatgtttattaagctcattcccagattgtgcatgcgtgtgtgtgtgtgtgtgtgtgtgtgtgtgatttgagtggatttttttcagaattatcctattagttttcttaatttattgattcttctgcattttcatcatattatctccaaataatgttaatttgtattcttttcctattagttatacctcatttctttttccggccttgctgtattggctaacatcctcaagtcaaatgtagcaaacttacggtgatagcaggtatctttgttttcttcctagcctattgaaaagtccttgggatttgtgttaaatatagaatttgtctgaactcttttagttgcaaatgacagaaagccagatcgatcaatggtaatggctcacagaaatctagggatagaactgtctgcaggcagaggtgatttttgatgttcaaaacttctatcagggccatgtctctctgtctccatctctcaccattattttcctttgtatacaatcattctcagaaatgctctctccatgaagtaggaagtagggaatgattctgattggtttgcagagcatacaagcccaccctctagttactgtgtcaggtgtgaagattggttgtgccggaagccatgacctgaacttatttggtgacaaaacctcacctgaactgacatgaagtaaaccatttacattttttttttttggtgcagaaatattaatcagcttaatagtctagaatgtgctgggagtgttagttaatatgtaatctaagtactgcattatcattgtaaaatttataaaattctgagttctcatttatgtcttgctccagtggaatcacataggggattgtgagcctgtataattaaattttccatatgtatctgtaaattgaatctaaaaattttaaaaatccaatgtttccaataatcactataaaacaaaatagaataactcataggttaagacatataaccttgtatcatgaaaacagtgccactaaaagtagaaatacaacgagtaaaagttgaaagtgggaggaatggagcagagcatttttcactttacatattttaatatagtttacccttttcatgaagaaggttcagttcttttacctagaaacttactacctagaattcatttgcttcttggaaacactccttctgatttccctgcctccttcttgtattgcagccttggttttccaggacgattgcatgaccaacttcttggaatttcctttcattttgtagccttatttggtccatggtttcttaaaccttatattttcctcattcctacatcccatttttgttattgttgttatttggtggcatcctcaagtaattctttaagaaaaaatctgtagatggtaaattttatgagtccccacatgcctgaaaatgactttattttgtctctactcttgattgatagctagaattttaagttcaaaataattctcactcagaacttttgaaggcactgctctgatgttttctggcatccaacatcacttatgaaatgtctgaaaccaatttggtccttcttcctttgaagataaacattgtaatctctttggaagcttttaggaccttctttagaatccttgtgttccgaaattttataagaatgttcttagattttttttcctccatttttttctgctcaacgccatatggaatctttcaaaatgaagacttacagtattccatttgtaggcttgtttaagctttgggaaatttcattcactactcctttgataaattgctcacattccttttcttagctacctctttctagagctactaggagacagatgttggccttcctggattgattgtgctgaaatcttttgcattttctttcttttttctttttttttttttttaagattctggaacgtttccttgacttttccatgtagtgtttcatcaatctttcaaatgtcaacaattacattttgaattttcaaaaacctttgctccttttatcactgcaacctgttcttgttttgtggataaaatattttgtcaaatcttcttcacatcaccaattaaaattattttatgattccattctcttccctgaattatttctgttttctccagcatcagagaatcaatgtattccttttgattcttttggggttttgttacaatttttctcagaatctggtaactgttggttgtccatttatatgcatgaatgaagaagtaagataattattaaatgcagccatcatggatttccttcgcagcttgcatatgtcaggcttcattctaggaagtgtggaaccaggagcaagtgagcaggttgggtgcaccctcccagaccccccaaaaaagctagctcccaatctggggtcttatccttcattctagaagccagtgcctttgtagtgagaaagtgttgacaaggatcaaagatttcctcaggcaggccctgataaaataatgtcatctctttataatgctgcatgatgagctatttagaatggtccaggaagggataaatcatttttatctactaaagatactcaaatatctacttcaagatattgttatacaataattgtatcattcatattgtgttctcagtccaccactgatgtgatttctttcctttccaaagttcatgcagaagtatttatttccagaattacagcattgaggacaaagtatgggctaaatggtatttcttctttgggggattttttgagatggtcattgcattgcagtctcatccatgagtccttttcattactttatgtggaaatttgaaaagaatatgaattttacatctgtaagatacaatgtttcctcttttactctttctcctcaataaatcaaactccttaattgtgttattcagctactgtctattttttatctacttgatctgtcacactctgaaagaggtgttattgctcttaagattgcagtttctgccaatttctcatcgtatttctaaaagttctttgcctaatgtatttctaggttagattttttttttttaatgtacagagtttttgacatctgtttggcagaatgtaccttttataaaaatgaaatatcccatttaatgcattttgcttaagctatactttgatagtaatattgccacctgctttccttctgtttccatttgcctattgtatcttccagcattttcaatttttccttatcattttttttaaaatgttcttttaaacagtctctggctgggttttgtttttcttctcttaactcaattttggatccattgtcttttaatggagaaatgtaattccttctgttaattatgttaaatgatttgcttgctcttggttttatttttaccattaaaagttatattttaattgatgaataaatattatatatttatggggtacactgtaatgtttggtatatgcttacaatgtggaatgattaaaaccttatctatttcaatttatgttatgtggttattttctttcctttgctatctttctttggaatgatcagtttttattcttactgctttgaaagttttgcatgttatttctttcctactagcagataatattaatttttgtagcaaacatacttggccaattttttttctaatggcaagatcgaaactctatttatagccttactccataaccccagactaagataagcatttagtatttatgtactccaccccatttgccatattttattgaaagtatctgaaatgttagttccataatgtattaaaaaataaaattatctattttttctttcaagaattctttctttgtaattgatctaagttataaaaccatattgttaacaatttcttgagcttaatattcattttactatttttttcccaaaatgtttactacaaattccctctattccattatagttatgttgattcacatctttcttaaataatttttacaaaaggcacatagatatcatattaattcaatcctttcattttaaaatgtataaaaaaatgatgatttacatgggaataaaattccagggaattagttcatcttgcttaagatttctagaatttgtacttcattccttaatgtttgtttagaaactcttgtcttttgtattggttcctaaaatctaattctgctagcccacagttttagcatttttctttgaagataatattttccttcttttttactacacatatttagaattttatctttattcttggaatccagaaatttgtcaggatatgtcaagggacaggccttaagaaataatcttatctggctcttaggaagactttaggatacagagacttgtgactttctttggctcagggaaaatatcttttattatatctctgattaatgctttccttcttcttctcttttcttttatgatattcactatttgttactttctgcattcttctctctggcctagttaactagtttgtcttatttcttatttgtcaattgttcatttttcatacttggcatctctttttttggataaaatgccttctcaaaattcactaaaatgaaacatatatatatgtatgcttatttaattttcttcagtttcctatatttacttttatctgtaggtgttattaattctgattgctcaacctgattatcccccacccatcattttctgcaataaaacacacagatgtgcgcttcaatcagttttgacacttgtatgcacctgggtaacagctactctagccaagacatgggacactcctatgggcacagaaagctccctagtgcctcagaggcaatgactttttaaattttgtcatcataatttatattttcctgttctaaagcttcttgtaagtggaatcatgcaatatatattcttttatgtcttcattcttcactcagtgtaacatctgtgatattcattgttttcacatgtattgggactttcccccgctttttccatcttttttcttttttgctggagagataagccaccatgtacatccattcatctcttgtacatttgagttatttccagttctgagctattatgaataggctgctatgaacattcttttgcatggacatatggtttcatttctttggggtaaataccaagagcagagttgctaagtggtagagtaggtatacgtctgacattataagaaactgtcagttttccaagcagttgtaccattttacacactcaacagtagtgtatgagagtctacttgctccatatcttcaccagcacttagtatggtcagtctttttacctttaatcattctcgtaggtgggtagtggtatttcattgtggctttatgttgcatttccttgatgactaatgatgttgaccactttttcatatattcattgatactttgtatatctgtgttttaaaagtattattcaagttttttgcctagttttaagattagttttttaaaaataattgttttgcaggaatttaaaaatatgtatactagcctttattggatatatgtattgtggatattgtttgccagtctttagcttgcctttccattttctacacaaaggcttttaaaagaagaaattttaattttgataacattcatatgctatatttttcttttgttgtttgtgctttcagtatcttggctaagatgcttccccattccctcagtgaacatgtggcaatgtcgcaacgtctagagacatttttgtttgccacaacttggagagagaagactaggacctagcaggtagaggccaagaatacatctaagcatcctataatgtacaggacagtctccctacaatgtagaattatccagccccaaatgtcaacagagtcatggttgagaaatcttggtttagagtgatacacaaaagtccaaatacattttccatttttcttgttgaagtgttcttatcagaaaagcatttccatctaatttatacatttgtaaaatctaatgtcctcctatgtcacattatagctactgcttattgaacacgtaactatgatacaggttccattttatatattttctatattattccacttaagcctgagaagtaggcattctctgcactttacaaatggagaaactgaagccagaaaggaaaaaggcccaatggttggtgaaagagccaggattcctgtttaggtcagtgtgatagtttactaacactaaaacttcttttgagtttattttaatataaaacctttgcttaggattgacttggagatgtgggctcttttttggttccatatgaactttaaagtcattttttccaattctgtgaagaaagtcattggtagcttgatggggatggcattgaatctataaattaccttgggcagtatggccatttccacgatattgattcttcctacccatgagcatggaatgttcctccatttgtttgtatcctcttttatttcattgagcagtggtttgtagttctccttgaagaggtccttcacgtcccttgtaagttggattcctaagtattttattctctttgaagcaattgtgaatgggagttcactcatgatttggctctctgtttgtctgttattggtgtgtaagaatgcttgtgatttttgtacattgattttgtatgctgagactttgctgaagttgcttatcagcttaaggagattttgggctgagacgatggggttttctagatatacaatcatgtcgtctgcaaacagggacaatttgacttcctcttttcctaattgaataccctttatttccttctcctgcctaattgccctggccagaacttccaactctatgtcgaataggagtggtgagagagggcatccctgtcttgtgccagttttcaaagggaatgcttccagtttttgcccattcagtatgatattggctgtgggtttgtcatagacagctcttattattttgatatacatcccatcaatacctaatttattgagagtttttagcaccaatgatgttgaattttgtcaaaggcattttctgcatctattgagataatcatgtggtttttgtctttggttctgtttatatgctggattacatttattgatttgcatatattgaaccagccttgcatcccagggatgaagcccacttgatcatggtggataagctttttgatgtgctgctggattcgttttgccagtattttattgaggatttttgcatcaatgtttatcaaggatattagtctaaaattctcttttttggttgtgtctctgtccagctttggtatcaggatgatgctggcctcataaaatgagttagggaggattccctctttttctattgattggaatagtttcagaaggaatggtaccagttcctccttgtacctctggtagaatttggctgtgaatccatctggtcctggactgtttttggttggtaagctattgattattgctgcaatttcagatcctgttattggtctattcagagattcaacttcttcctggtttagtcttgggagagtgtatgtgtcagggaatttatccatttcttctagattttctagtttatttgcatcaatcctaagccaaaaggacaaagctggaggcatcacgctacctgacttcagactacactacaaggctatagtaaccaaaacagcatggtactggtaccaaaacagagatatagatcaatggaacagaacagagccctcagaaataaagccgcatatctacaactatctgttctttgacaaacctgagaaaaacaggcaatggggaaaggattccctatttaataaatggtgctgggaaaactggctagccatatgtagaaagctgaaactggatcccttccttacaccttatacaaaaattagttcaagatggattaaagacttaaatgttagacctaaaaccataaaaaccctaaaagaaaacctaggcattaccattcaggacataggcatgggcaaggacttcatgtctaaaacaccaaaagcaatggcaacaaaagccaaaattgacaaatcggatctaattaaactaaagagcttctgcacagcaaaagaaactaccatcagagtgaacaggcaacctacaaaatgggagaaaattttcgcaacctactcatctgacaaagggcaaatatccagaatctacaatgaactcaaacaaatttacaagaaaaaaacaaacaaccccatcaaacagtggccaaaggatatgaacagacacttctcaaaagaagatatttatgcagccaaaagacacatgaaacaatgctcatcatcactggccatcagagaaatgcaaatcgaaaccacaatgagataccatctcatgccagttagaatggcaatcattaaaaagtcaggaaacaacaggtgccggagaggatgtggagaaataggaacacttttacactgttggtgggactgtaaactagttcaaccattgtggaagtcagtgtggcgattcctcagggatctagaactagaaataccatttgacccagccatcccattactgggtatatacccaaaggactataaatcatgctgctataaagacacatgcacacgtatgtttattgcggcactattcacaatagcaaagacttggaaccaacccaaatgtctaacaatgatagactggattaagaaaatgtggcacatatacaccatggaatcctatgcagccataaaaaatgatgagttcatgtcctttgtagggacatggatgaaattggaaatcatcattctcagtaaactatggcaaggacaaaaaaccaaacaccgcatgttctcagtcatagatgggaattgaacaatgagaacacatggacacaggaaggggaacaacacactctggggactgttgtggggtgggaggagtggggagggatagcattaggagatatacctaatgctaaatgacgagttaatgggtgcagcacaccagcatggcacatgtatacatatgtaactaacctgcacattgtgcacatgtaccctaaaacttaaagtgtaataatttttaaaaaaacctttgcattatcacttaaattacttaattttacttttaatgtaaaaatattgatagtcccagaaaagataggctccatttgtactatgatgatggagtaacctaggttggaatgcagggcagtaagaagatggatattttcatctcctctttagaaattgccaaactacataacagaagtcaagtgtctcctctgatactcagggatgaatttaggcaattgactggttttccctctatttttatttttgttttctatttgaccgtccaactttctgatgattgaaagtggtatcaagtaggttttgcttaggattagtaaaagacataagcaatttttcctgacagcccagaaaacaatataagtaaactacttatgaagattatagtgtactcccagggtgttttgagcaatctgaatgagtaataggaaatatatttgtatgcttgagacctttgaagcttctttcaaatacattgggtacctttgatattgcaactggatatccttctggaaaccctcaccattactgtacatcaagcaggtgttctttaaaaacactcactaggcttatgccatcatccaatcacactgatgttatgcggtgcttctataatgcaaattaggttgtggcactgcagtgctcaaaaccctattgcccacaagggcttttaaaaacctgtgtccaagcattaggagcactgtggtatgtcctcagggatctccatggaaagggaggaagggctgttcccttttggtccaaggtcctccaattccaatcagagcagctctgcttttctgtcgttttatatttttgactttcaatttcaaggagttccgtgattaagaattcttgaaatattttggcatgtgggacaatgtataaacttcgtaacattgcaaaaacaacccactgtgagttggcagtttgccaatgttgctaatcaaatctccttctcttcccccataaacatacacctcgtgctccatctagaaaaatgtgcagttctctgaaatattctgcaggtgcattattatattatacctccattgctttgtacattctggatttttttaaatttgtttttgcattccatgacattcttttctacctggggtacaagtatactcaaatttaaaagaaaatgccaatttttatttcagatgcatataccaatttatattcctacaatgcaatatttaggaatctccattgatccatatactttccaagacttggtataacccaattattaatttttccaaaactaagtaatgtaaaattgtatctcatagttctctaatgggatttccctaattattgaggttaatcatttttttcatatatttatttgacattcctattttatctctgtgaaaagcctgttcatgtcatattttctattgtttttgcatattacatattcattatatattctgaacaccagtcttttgtcagttatgttcattctaaaaatattctccctactcatgctttatgtttttactttctttatggtgtctgttgctgggcggacattttttaattttgatgcagatgaagttaattttaaaactatttcatgtttgtttctcttactatcttgcttatgaaatcttaacccatttcaacatttaaaagacatactcttttatattttttaaacatttaaaaatattgctttgctgtcttaattactactgcctcataaaggtcctgatatctggtaggacaagtaacctaaaaatctagttgaaattttgttttgaatgtccttataacttttaaaaattatttatttacttatatttgttgatatatattagatgtacctttatatctttttaataaatttgggaagaattaacacctgtatgctattaagcgttctaatccataatcatgatatatcttctcatttttacaggttttctttaatatctttccaaaatagtttatacatatacatagaaaatttgtatagttctctttgtacagatatttttcaggcttattcctatgtaacttggaatattgtaaatttttttcttttttttgaaacagggtcttactctgccacccaggctgtagtgtactggcacaatcacaattcattgcagcctcaactcccaggctcaagcaatcctcccacctcagcctcctgagtagggatataggcactatacctatagctgggactataggcacaagccaccaggcctggctattaataaataaatgtgtagagtctcactatgttgcccaggctgttctggaactcctgggctcaaagggtctgcctgcctctgctccccaaagtgctgggattataggtatgagccactgcaactggctagattttctttttaacacaaatttttcaacttttcatattattattaaaatagtttttaaaattatcattgctagtacatagaattgatttttatatattgatcatataccagccatcttgccaaactttctagtattttgttttatattcttttggtttttctatgaagataattatgtgatctgaaaaataacattttttatttttctttcctactgttggtacttttacttttgtttcctattacagtgacttagatattgaatccaatatttaataaaaatagtgatagtgaggttaagcatatttgacttgttcctcattttaaaggtacttgtcatttttcattatcaaaaataacatttctgggaggggggggtggatgatgagaaattatatagtggatccaatacctgttatttgggtgatggataccctaaaagccctgacttcacaacaccatgcattctacccgtgtaacaaaattatacttgtatcctataaaatgtatacaaataaaaagaaagaacaattatgttttatgtaagttcgttatagaattcctttaaaatggtaaggatattctattcctagtttgttgaaaattttatcttatattttataattgtcatgaaattattatcaaatgctttttctgtatacattaaaatgatcacataattgttcatctttaaatttaatatattaaatggcatttatagatttgaaaatattaagccactcttgtatttctgggttaaaagtgacttggtcatgatgcattatcatttttatatacactactagattctgcttgctaataggaccttttgcatctttgctcatgaatgacattagcctagaagtatcttttgtcctatgtcctagtctggtttgatatgaaggttttactgtcttcatagcttaggggaagtatttcttctttattctttaaaaggctttttaaaaattaaaattactttttgaaagtttcacttgtagaattatctgagtcaatgtgtggtgtgtgtgtttgtatgtgaagtcctaaaatcatgaattaaatgtatataataatgaagaaagatgttcatgcattctatccctttctgtgttttttggaaaagttttattttctaggaaattgcccattttgatcaatattttgcactcagtagcaaacatttttcattgaattcttttatcttttcagtatctgttatatttgtagttatatttccatttcagtttttaatatagtttacttgggcatcctctctttttgtctagatcactcttgcctgagatctgattatttattagctttttcaaaggaacaatttttgctaatctcctgtattgaactttcaaaaaatactatatatatatatatatatatatatatatatatatatatatatacacacacatacatatattccattgcccggatgtgtaacagtttagccattcacctactgaaggacaatttgatacttccaagttcttgcaattatgaataaagctgcaataaacattagtttttgtgctggttgtgtggacatacattttcaactctttgggggaaatgccaaggagtgtgactgctggatcatatgagaagattatgcttaatttttaaagaaatgtcaaactgtcttcccaaagggactgtaccatgttgcattcccaccaatacatgagagcactgttgcttcatatcctcctgccccccccaaaaaaaaattgaactaaactttattgtttttaaaatatttatttatttatttagtttttgagacagagtcccgctctgtcaccgggctggagggcagtggtgtgatctcggctcaccgcaacctcctcctcccgggttcaagcgattctcctgcctcagcctcatgagtagctgggattacaggtgcccaccaccgcgtctggctaatttttgtatttttagtagaaacggggtttcaccatcttggccaggctggtctcgaaatcctgacctcgtgatccgccctcctcggcctcccaaagtgctgggattacaggcgtgagccaccgcgcctggccaactttatttttattagctctttcctactgtattttagttcattctgttgtttttatactaactgtaaagatggatgtttagctcattaatatactgttatattgattttaggaaaatgatctgtaagccattttgttggaagtttagtacaggacaattattaggatcagaaaaataaatttttgatactaatgcttttcaaatttagaatccaaattaaaacaatgtcagtgaatacatttcattttaaggttccatgtgaatgtgaatatgtaacaaaacacctactctatatttctatccatcagtattttatttacccaccagccttcatttctcttttgaaatgtggctgacttaattccctcctatcatttagctttcttagcattgcacttgccagccgggcacagtggctcacacctgtaatcccagcactttgggaggccaaagtgggcatattatttgacaaggagttcgagagcagcctggtcaacatggcaaaaccccgtctctaataaaaataaaaaaatttgccaggcatggtggtgcacatctgtagtcccagctacttgggaggctgaggtgggaggatatcatgaacccgggaggtggaggctgcagtgagctgagatcatgccactgtactccagcctgggcaacagagggagactgcctcaaaaaaaaaaaattgcacgtgccttataatgggtaagactcagaactccatgagatttacaagctctgacttggagaaatttgaatttttgtatgtcaatagttgcgtcccactgaatccgacttgtgaatcaggaaggatgctactcattatttctagatcaatggtctcctttggatgcttaaaggatggcacctttctccaaaatgtttacagatacccagaggtcttatttcatttgatacgacatagactttcctgttgcattttgtttaccagtgggcattggatgttggactttttgtagaaatttgaccttatttcttaggattcttaacattttctggtcagaaaacatcacaaaaaccaaatggtgggagggactataaccacagtgagtccttcttcatgccaaaagaaattacagcccactctcttttgtacctgaatgagtccattattagcattattcaattaaaaagagggaaaggaggcattttataaaattgttggcatgcagccgccatccctgataagatactagtggatataattcctatatatgtagacattcagttgaatgaggtttgcacacattgatcacacctgtttgctacaatttgccatgccagttatcttgtttcccttttttgcccaaggatgttgtacatgaaagtagcgcatcctgtggaagagctttttctaaccaaaggagctatcctattgttaattctgacataaacctgcataagtagagagaaatgcagatttcagcctgccatgctgagaatttgctttgtttgatctgcgtattgcaggacacatgatgttcagcatgctctgaggcccctgaaatacctcgctaccacacaggccatattttttaataaccactttaacacagagcaggggaaatctcagccacacacagctcaggatgctataaccagagagcctcctgggagcagtcggtccactcctaggcttgttttctcgtgacacacatcttctgtctaaattctttagcgaggattctcaggcctcagcgtggtgaggagtatggactccctagctgtgaaacaaatggcgaatgtgttagtggccagggctggtagttactcccgttcagtgtcatcgagtgtatgtgataaaaccggtgtctaaagatttccttggtctctgcccaggagcaaaaagaaactttccttcaaggactattaacgtcacacgattcaaagcatatcacaccccaggtgtttttaggcatcaagagaatatacactatacatcaatgatcagttgcctaaaaacaacacatatatattaggctgaggaatgccaacaacacatcttgtggctacccggcgaactgatatagttaggaacatatatgtgcgttgggctataatgacatttccttgtatcacatctatcaggttacaagcgactaataattttcttttgctagtcacagccaaacattataatggcacataccataaatcaacatcaacacggaacattgcttagcaaatataaatgtatgtgcattgccgaatgatctgagattacaaaaatatatcagaagtcaaaagtagctggtggagaaacgctatgtctttagtttattgagattgtttggaggatcctaatgtactgtcactgaaagaataatttttcctttacaatctacttagcaaagatttatcgatcctttcccccttcatagagaattactgatccattttagaaaatcagattttcacacctttcatgagaatgtgcccagcgcagttctcaggggactgcccgggaagttgactttgacgtgcagtcccttgaaacttacacaccacagcctagtgtctcatcgctgatttgttgcaccaggcagtaacaatctttcatacatttatagagaaatgattgtactgcaaggacttatttttccgcgctagtggatgtattcagggtactgttatttgtgtaaacagcatttttcagatgtggtgctttttcttactcttttcttccctgtcttctcagctgtaatgttatgaacagtaaggtaagataaaagttgctgaaaatcgtgctgcaaagccatgggatgccgtagaatttttcagtgtgcgtaaataactttcttcaagccgtacacgtctgccctgctctcattatgggagtaacctaggtagctaagcagccgacatgttatattgaagtatgcatcataatgaaggtgatttattataattaaaactgtgtggagaggagctttgtgttagacctattgtttcacagaagagcttcataaagagcattatgattagttatggatttgggtgagggatgttgtttactgggagttacgtgagtattagtcaaagtctgaagttgctttttgagttcttctgaactgggaaggaagaaacgttcagtaaaggaagaatttttatactggtaggaggagagtgtgtatgtgtttgcatgcaagagtaggagagaggggggaggcagatagagaagaaaatgacgtgcacctgaagtgttctcggcaggagcagttctagaatactttattacatatctatggagacaatggcatggactgtaagtagctcctgtctcttgatataataatgcacataaagtcggggtcagattgggttcgctctgggctttgatgctgcagaaggtcactaggggaatcgatggaccaaaatgagtcctgagtttcaggcaatcaatgcgatttttctatttaaagtggacactgctgggtgtgaatcttgagcttcaaatgcgggttggctcagcttttcaggtcaagagtagattgcattacaaataggttgtttatgatcataattgaggtgatgtggtgaatgcacaataggagaggcagtttgcaaatgctgctttcaagtttggcgccctgttattttggcagccacattcatagccatttggttgtgaggggatgccgagttctctgtttattttgctatttttaatgaatcaaaagtaaggaaactcttttaaaaatagttattaaaaatagaatattttaaaatattttctatattctgtctgttcatccatctatccatcttcaggtctttctgattggaaggtagagagaaggattctctaatgtgtgtttatatgcacagacacacacatatgtattatatatgtgtgtatatatatttttaatatttttaaataattatattttttaaagttttttttaaagtttgctctggttggaaagtgaatgtaagattttttattatttgcaaagctagaagagttccgattttgtgttgatatctcaagctctcactctgcaggggcaagaagatccctgtttaaaaggacaaattacaaatgcagtttcccctccagaataaaagttctggagttgctgaaggatcttttatgagtttttcttcatcatgtcacattgccactgagatatgctgtatgtcatttagggaaacattacagagggaaggcactggcgttttctgtttggaggagaaggcgagtgaaaaaaatgggatttataaaaatattctggggaagtctatgaaggactcttcttttggtgtatcccacaggggaactggcagcgacaaagacaaaagtaactggcagattctgcattttacttagggtaaaacttcacttcttcctgcgaatcaggtttctaacctacgggggaaaatagctgaatgggattcccagttattaaagggccaggaagctggagaaattaaggaatattaaccttccattaagttgaaacacatttgccactgaattgctacttggtgctttttttttttctccactctaaaagataacattgctccctagcttttaatttaaacttaatttaatttgaacttcaagggttttaatttattaaaagaagatgagaggaaataagttgaaatcaccagtgacccgtggcagaaggccaagttcacactgtccgccacaggtcctggcagccttttgcattcaaataaacatttttttttaaacaaagagctaattgagtatatttgtaataacataagtcacaagtacagttgtacagagatctaaatttatttgcccaaactggaaaaatgccgcccaaagaatatgaggcgtgcgggagaggagaggcgtgctgagaacaggtggagcctttgcctacaggatacagctcatttgcaaggagtacaggctgtctctctgtctgtgatgaagggtctttttatgtagggcccagatgtagcactttggttcacattaccatccttatccctgagtcttcttttaatcatctctagacttttgtgcagcaggaatgattagagttcttagccaaaccattttgtgtttgtttatttaattgtaacagtccccaaacaactcagaaataagctaccgaaaatagtcttttagaatatgcttccattgggtagcaccttcaatctcaggaatcagaaatactatgtaaagacctgcaaagtatggaaagaatgatttaattataattaattgtcatgaatgatgccatttacatttattctacataatactaaatacaaaatttaacttttaaggcaggatgtttttttctttgctttaccagtgactctataagacatatgccatttaaaaataagaggaaggggaagtttcaagtttttagttatgattcttagttttcagaataagtttgtttgtgaaaggaatacaatgcttaagttttatctgacatagatttaaaaaaaaaaatcttatgtcttatactccaagaaggaatacccagcaaatggaaaaatacattttatgcatatgaatttatatgtcattttatatttgacaatatttcacatgaaatttgagcctcttatatttattattccatttaattcacagtgtcctagtattttaacttgtaggtccatggtgaaatgaaagagtacctgttattattattattattattattattattttaaacctttattttaggttcaagggtacatgtgcaggtttgttatataggtaaatttcgtgtcatgggggttttgtatacagactatttcatcaccctgatacaaagcatactcttactgattatgattttgaaatctttcttacataatcctcatttgaaaaatgaatttgagagactcagttgctgtttaaagaccctgaggccttttggggagggtgaattaagacttccagtgagatgcttcttcctacaaaatcacttttccctcagatgaggatactgaggtaatggaaaaacccttaatctccaaagcatccctgaatgtgccaccctgaaaattaacctcatttatccctttccccaaccttcatttattttcttttttgagacctcagaaaaattgagcacataaattaaagtgtcctcttagctgctctaacttatgcaaccagcatttactcagcagcaccctgggtctcggagaccttggtaacatcactggggtcatatttttacccagacaaactgctcatgagccattttttcaacatcttagacccaaactggcttttctttgatttcagagatgaaggttgtcttcttttttgtcttaattttttttgaaaaggcatttattgtggctattctgagaaaaatctcactttctagtaacatttgctttctcctttgtgtctccagcaacgtatttggcaaataaagagatacaggatcttactctgtatttatgttttcatttttttatttggaggcaccctgtccacgtttccagtaccacagaccaaatcatgtttgttgatatttttcaaaaacaggtctagttctgaagagaggttttggttgatttgctcttgggagaggttctttgtgccatcggcctgattgtttagcactaccatcagtagaggttaggatacctttctagttttctgaaggccaagggtcaataaaacatcccccgaccatttaccgccccatattagtttaagcaagcaagagacatgcaataagctattttccaaaaatctctccaaattcaaatatatagcaggtttattttgatggtcttaaagaaaggagttctcactggaaacaggtaatctactcaagggaccagttgaatgaatgtgtgttggtcacagacctgttcaagctgtagcttaactgagcattcaaaaattaaggaataaaatggtttgccaactctggagtttctctcttttgtcataggattgtttcttccacttgtaagaactgtctggaggactgactctgtcccaccaagatgaggatacaagatcacattttttttgacgtacccttttctttggtatactatacttttccatcatttatgtcacctagttttcattgtatattaaaatttgcatttgtttcaggggaaaattaagctgactatttctaaggaatttaaacactcctatgaacatttaaggcctctatttttaatataaaatggtaaatttattttgcctaaaataaatgtatttgaatcccaaaaggtttaagttagttttaggaagataactgatagcaaagaccatttcccaagcacccgccacaacacacatacaaacagcactcagatctctgaaaatttagccttaaggcaatttgaatcttggggaaatatctcctcatttttcattctggcttgactttattataaccttggaattaagtgcggtgtttattctttcttgtgtatccctttaaaaacctctttagtaatgctgttaaactgctgaaacccttgccttatcatccatacccactgtagttcttgctgatatcttaattaactcctacattcctctatttaaatcttggctagtgtagaatacgtcccattggaagcaacagtacctgggctgactttagttgtttctttgtgatttgtctcaggcatatgagagagcttcttcttaccccagtatctccttctgtcgacagggaatattaggtcaccacagagacaaaagaaggggaaactgtgggtgtttaataatgagggaagacaaaactgcttatgaagtgctcttagttcccagggaataggtgatatataaatacatggatttagggcatggattcaagccagtttgaattcacataagttttgttggacaattgtatcacaatattgactcaagtccagattagggcctctagggtgtccctttctctactaatttgtagtttattggttccaagattccattactctctatctgattttctcgacatttctcttgctattttaccatggtcaaaagttctgtttggaaatggcagatacaagaggttatagaatgctggcttcacatttaatttccttcattcttggagactcactgtgttctctgtaatttattaaaagaaaatgaatcaatggtaaaaagggcttattagtcaatttccattgcaatctgactttttttgtcatctacatcctcagatgtctacatctttaattttatgaagtacaggtgagctcctttatggacgcatcaactaattgcattcacttaaagaaaaaaagagactatatttttttctttactctctcactatagacaatctccataattgcaaaaagaaaagaaaggtaaataatgatgccaagtaattctaattatttcaatggatattggaactctatcaattacttaaataacttaggaatggaggtatgttggattaagaaccatcagcatgtgagttgatagtcgcaaataaaacaaatggtttgagacacacataatatccgggactctggtcctgagatacttctgaatctagtatcccatgaaaggtatgtctacaaatttggattttcagtttttgagtaatgggcaaaggttaggtggagagtgcatttggaaatcatactgtgaaaccagaagtttgactggggctcaacttggtgtgatatcggattaggtatagagcttgatgcaatgacttcaaatctctggtgaatgcaggtgtctggaatcctgggcttaagtgggttgtactgaattccctcacctgctttttatcagcagctgtattgacaagattttcattacttcctaaatgtctgcactggcttgctttatttttccttttaaagtttatatatattatatacatatatatgtattatatatatgtatatattatatacatttatatatatatatatataaatcccagattgactgagttaatccagatatccagataactgcactttacttctatagcaagctttacagggccaataattttcttgcatgtaaaataatgcataggtagtaaaatgtacaaaaaaacattaatttctttatttctactgccataaaaatctatctatatatttttagaaaatctgagacataaaatttcattacatagaattaacctgaattacatttaatataatgtagttatcctatctttaagacatattttgtgatcttacctttagccagtaattaatgccacttctaagataataaacaacattatttcctaaggaaatagtcagaaatggaatgaaaattttctgtacagttaacaaattacccataaaatgtaaacttggttttgaaaaaacccaaagctatgttttccagaagaaaacaactggaaaaaaatgtagaaaatagtaatagtggttattctgaaatagaattctgggtaattttaattttcttccctgttcttttttatattttgtatttttcctatagtaatcatttattatttttcaatgataaaatatgtaaatcataatttaagaaaagtattcaagcaataatcttcaatgaaacaaattcaaatattcaagtatgtaaattacaacatggtactttgcctcttgtcccactatgattctgttctaatttctgtttacccttcctgacatcttttctgtgcctctaaactcacacaaacgcatacactttcgcatacttacatactcaaacacatacagacttttttaaaaatgaaaatatactcatacagtggtctgtagaatttttcaagccaattattaaagggttggtgcttgaatcgagccatggttagtgttcacctcatggacatcagcaaacactactcaaggcttcctccttcaatgagagatggatcccaacacaccagtggtgtgtactgtatgttttattcagcagcttgcttttcacttagtaatgtaccacaggccttgttccaagtcagtacatatagctttatctgattttttttatggttgcgtgatcttctgttgcatcgatggaaccatctctctatggataaacttttgtgcattttccaatttttcacttcacaagttatcctgtaaagaagtatgatgcttatataattgaggtatttgtgcaagtctttctgaagttcagattcttagaagtggaggttcgttggtcaaaagacatgtaaatttaaagtttgactactattggtagattgctctccaaaatcattgttccagtttatacatcaaccaattctccatcttctggtgatcttttgattgaaatcaatcttctaaattttctaattttataggcaaaatgataagtatactttaattatctgtaaggttaaccacttttttatgtttattggtcatttgaatgtctttttgatttatttataggtaccctttatattatggatactacatttttgttacatgtgttgtaaatattttcttccaatatattcttttttatttccatcttattgatggtttcttttgtcttataagagataaaattttgccttatgatatctagctttcatgccagacttataaagtcttctctaatctaagactaggacattattagatgatatcttttcttccacatgttttcatggaaaaggaggcttccattcccacccaaagacccaaggagtattgaaatgatctcatctacttctttacttttcaccatgcgaggaggattggctaatttgactggtaagaatcacaggcatttattgggctggatttacaaacgttatggtcagagtgttgaaactgatagtttcctatgacacagcctcttgtcttcttggatacatactctgaagaatgggcaggagagcatgtgggaggaacagagggaaagttgttttccatgcctacatttttatagaggttccatttcaatgcccactgagactatgtaaataagacatcaaaggaatcagaggaaaatgatcaattaaaaatgtgagtggccaagctgtaaaatagaaagagcaaattaaatgaatggtgactcctgcaatgctactccccactgtggcatacatactagtgtttacagcttcctggttcatgggaggattgtacttctctgccctttagaagttaagaggaaccactgaatgagttctggccactggactgtggtggaaaagtgatgtatgtcactgtatagccaggacattcaattgggatggtgagactttctgctgcagtgatcatggaaggatgtgctgagatccatgcctctgtcagcagggtctctgagtgacgagagtgaacagagccctgctgccaacccatgtttgacatgtagcatgaacaagaaaaaaatgctgttttaagatgctgagattttgaagtgaagttgtttgttactgcagactgacctagcctatgctgactgtcacattcatcaacaaacagtgtagacctcaccccaggtgtattccctttaatgtcagcctctttagaggggcttaccttgcactgtcaatctccaagtggtaaatggatcttatcagagtctgctggagacccattgagatgcctgtttgtactttgtttcagcttttcagttctatgtggctggctaagtcgtgccttcagggcacactgacctgtttttaactggggcagggagaatagaaatcttctcctttgtctcaggctgtctcttacactgcatcctccaatcagaggccttgcctttggaagatttggaaacacctgccaggacatgaataacattggcaatttgatcctcactgggcaagtgattctggagtgtgtgtatgttctctgtaagttggatcccagaaaggataatgggggagtgttaggcttcctaacatcccacaaaagacatcctccttaattttattctggtagaagttttatatttatatcataggagtacagttttaacatgctatattttgcacattattgtgtttaacatgacacatttaattcaagcatgcaattctgaattccaccacctttttatgtaaaaatggtaagaaaatacactgggaaaaaaaatggaactcttagaaatttcaccatctgacctaggaatggacaccaatactataaagtagcaaagactatttatgagagcaatttttgtgacattattctctgtctataaatatgtcctcaatgcaagaagaccaaggagggggaaactcccctgtaatactcatttagggaagtgaaggactgctttccaaaccaaggcaagtgctgttgcagtaatggggcatcaaacaggcaaaattgcatgtgttgtcaatggctacagtgtaattttattgatttacaatgtttaaagtgaagacatgatttctggcttatataaggtgtcacactggagtaattgcacaccaactggattttatgaccagtaaagaacatgtaatgcccacacagattcctcaggctgtctagcatttacggttgttcagtaatcaaggagttgttattagccgttgtcttgcttgaatagtcacagaaagaacagatgttacctggcatggacttggttttagcatacttatttaaatcctccaaaggaaaacatcctcaagttgctagcttggtgtagtcttgatccattctgcccccttggtcctccattgtccaggttttcaggaatcccataatgctctctgttgcatgaaggctgccataccccaggctcaagtacaaaattattgggaaatacatctgtctttaagcaattcaccagagtcctcagaggcagtgattctcatgccccttcatcagaatcaccaggtttccaggccctatctcagatgcattgaagtagaatctcctgggcgtagggacttaaagagtgcattttgaacaaacaccctaggggattcttacgcacaggagagtctaggaacctggaagtgaagaaagaatgtacttaagctgtgacccattagaaaattttaaagaacgtatggggtcgattttcattatcattttgttttccatttatgaaatacctttattcagagaaactaaaaaatccaagtttacatcctttttccaaatgattttcatgatgctttaagacacattacattcaagatttgttgtgcataagaatacatgtccatatatttctacttctacagggattatagatatattttatgtaaagattctttctggagcttacccattccatttttgacaataaaatgttttgagatattttgagacaattgtgtttaatgaaggagcagatactgtagcattttgatttaaaattaaaagacgttgtttttctgagactgatagatttataaagcgattttcaaaatattgccaccttcgtcatgaaataataaatgttttctgagactgaccaatactgtgatgggattaaattagaaatccatttctgttcttacaggttgttgtggttagcacaggatgtcgtttctcacaggctaaaaattgctgacagagcccatgaataagttgataaatatgagcatttttttgcagaaaaaacatgttcaagttagcatgcagaaagaagaaaagatatttttccatatgatgttttataagaaggctgtgatttttttttgtaactggtgattggcttagctgggaaacatattaaagggcaattatcagtcctctttgaaggcacaaaaggtgattcctatctgtggtcattccaggggcatggtttggtccctttctgaaccctcaccagatgcaaatcttatttgatcaattttgcaatgcttcttgtgaaaacagactggcataaggagtctgtggccttctaggtagtgacttctctgggtacacaggtatccatctcattacagtaatgttccttgagattctttaaggctgtaaaccctgtagttatgatatagtacactcctctatcagtttccattcctcagagcaataagcatcgcgaattcgcatcccgtacctatagctcgaactgagaaattatcagcaccttagtcagcttcaggacccactgggtgggattttcactcctacctttacatgccccaaagcatgagagcttcctatataaaagcctgtggctaacccagcttcattcattccagaggtgtgaggggaggggtttccagcaagttatagctctttatgctctctccctgccaagattctaggcacattgccattcgtagactttatgggatttttccagtatctgtttgccataaaccttcttgatctctctgacttcccttctagtattatttgtattctcacattgggatgaggctctttagcttgtttttttttttaatctttattgaggcataatttacatgctgtacattcactcattcaaaatgtacaatgtaatgatttttgttaaatttgtgaagtttcacaaccatcactacaaccagttttagaacactgtcttcattccaaaatgtttccttattcccctctacagccagtctccactcctacccctaccccaggcaaccaaaggtctgctttctgtcactacaaattggccttttccagacattttactaatccatttttattttccattttactttaattttatcacattttatttacccattcatagttgacagacacttggattgtttcctgtcttttgctattaagagtaatgtggctatgatcaggcagatacaagtatttgtgtagagatgttttcacttttcttgggtagattcttagaagtgggatttgtgggtcatattgatatgtttatggttcactttttagaaaactgttaaacagttttccaaatggctgtaccattttacattagcatcagcaggatataacagctcaggtttctccaccttcttgccaaaaattgatattgtctatattttttattataactattgtaatggatttattgtggtatctcattgtggtttaatttgcgtttctcaaattactaaataagtgagcatcctttcccgtgtcttttagctatttgtatatctcatttggcgaaagtatatttaaatttttttctcatttttaaattgagttgtttgtcttattgagctgaagagtttgttatatattctggatacaagcactttgtcggaaatctgattttcaaatattttcccccagtctgtggcttgtctttttattttcttaatagtttaatttgaagtgcaagagttattcatcttaataatcttttttaaaaaatgggttgtgcttttattgtcacattaagaattccttatataacccaagtcacagagcttttcttctagatcaggattttgcataacagcattcttgctattttcttctcgatcaggattttgcaatagcagcattcttgatatgttgagccagataattctttgtcatgggagcctgtctttttcattccagaatacatagcagcatccatggcttttatgcactagatccattagcgcttgcctgaccccttctcactggttatgacaactgaaaatgtctcgagacattatcaaatgtcccttggcaagcaaattcatcctgattgagaaccactgttccagaagttttatagtttaaactactagcatttagggttatggtctattttgagtttatttgtgcatgtggtatgagataaagatctaagttctttttttctttcatatgaatatccacttgtcccagcaccatttgttaacagactgtcattccccccattaaattgtctccacatttttgtcaaaaattaattgaccaaaattgtaaacatttaattctggaatttcattttgctccattaacctatatacatacacttacagcaatgcctcactgccttgattactgtagctttatagtaagttttgaaaccaggtagttagtgcaagtcttccaactttgttcttctttttggaaattattcaggttattccaggctctctgcatttatgtataaattttatatattgatcaatttgtcatttttcacaaaaaaagcctattgaaattttgatagaaattgccatgaatctgtataaataaaattgaggagaattgccattttaacactattaggttttccaatccatgaaaagggaatatgtctccacttatttctttacctccctttatttctttcactcagcacttgtagttttcattgtataaatcttacactttgttagattcatcattagtattttgttttatgttactattgtgaatggaattgtattcttgatttgattttcagattgttcattactagtatttgcaacgacaatagattttttgtatattgatcttctatcatgcaaccttgtagaaggcgtgtggtgtgtatgtgtatattcctagaactttctccatacaagattatgtcatctgcaaacaaaaaaaattgtttttgaccattcttcttttccagtgtagatgcacttaatattttttctgtagacattgaggaaattctgtttgattccatttaaaattttttaaaaatcatgaatgcatgtggaattttgtcaactgccttttctttttctacatctgtaaaatggtcatgtaaggtaatttttaggtgttaaatcaactttgtattcttaggtaaatcccacttggttgtggtataaaatatgtttaaactgctgattggtttggtttgctaattttttaaaagaatttttgcctctgtattctcagggacattaatctgcaattttatttttttatgatgtctttggctggctttgttaaataggcctcgtagaatgatttggaaagactttactctttctctattttctgaaagagcaattgaaggattggtatttaaatagttgatagaattcatcagtgaagctatctagaactaggagtttctttgtggtaagagttttaaattacgaattccattgctttattggttgtaggtctatacaaattttctctctttttttaagcttttatcttagtttcaggggtatgtgtgcagttttgttacatagctaaattgtatgttgtggggtttggtgttcagattatttcatcacccaggtaataagcatattacctgataggtagttttttttttatcttcacccacctctcaccctgcaccctcaagtaggccccagtgtctgttgttcccctctttgtgtctatgtgttctaagtgagaaaatgcattatttggttttctgttcctgtgttagtgtcctaaggacaatggcctccagctccatattgctgcaatggacatgatctcattcttttttatggctgcctaatagtccatggtgtatatgtaccgtgttttctttatccagtctaccgttgatgggcatctaggttgattccatatcgttgttattgtgaatagtgctgcaatgaacatacatgtgcatgtctttttgatagaaaaatttatattcctttgtgtatatacccaataatgggattgctgggtttcatggtagttctaagttctttgggaaattaccaaactgctttccacagtggttgaactaatttacattcccaccagcagtgtatgagccgtcccttttttccacaacttcccagcatctatttttatgactttttaataatagccattctgactggtgtgagatggtatctcatatctatacagatttcctatgtcttcttgagtcagtttgctcatttctgtctttctagaaatttgtcatttcatctaatttgtcaaattttggggaaaaagttgttaatgtccctttagaatccttttaatttctgtagggttggtactgatgttacctcttttgctctttattttggcaatttgtgctttctttctttttattcttagtttggctgaagatttaccaattttgttgatctttttaaataatcaccttttggtttcgttattttctatgtttttttctatttccttgatgttcatgtaaatccatattatttcctttttctttttgtttttgggtttaggttgctcttatttttctagttagctaaagaggaagcttgaattattgactggagactatttttctttttgtaaactataaacttccttttaagcactgttttaaatgcatgatatacatattttgatttttttgtttttaattcagctcaaaatattttgcaattttctctcactcatgggtgttagaagtgtgttgtttaatttccaaatatttggggattcatcagatctctttctttcattgatttctgacttaattccgttgtagtcatagaacacactttatattatttcaatcctttaaatttattgaggcttgctttatagcctagcatagagatcagcaaatgatagcttgtggttatgcatcttaagtaattacaatttactttatcataataccaacttaattctgctctgttatatctagcagtgtgcccctgaagtagaatttttattttagttattgtacttttatcaccagaatttccatttggatttttaaaataatttctatatctttactgaggtcctttattttttggactattgtcataataatttcccttaattatttactgttaatttactctagttctttgaacatatatataaaactgagttgatgttgttatctgctaaatttggcatctgaggacactcagagaaatgtctattcactgctattttccttctttaatatgagtaacactttcctgtttctttgcatgtctcataatttttattgaatgtggactattttaagatgccatattatagcagctcttgattccaattttttttgttctggaggttattaccaatattgttttaaaaatgtgtttatatctttgtttagtaacttgtttggactaaatttttgaagtttttttcatctatagtgtgtggacactactctctgcttagcaccccttttcccccaacccccttgccacaaccttgttcatatttttaaggctgacttcttaggagtcctgtttctgcataacctaatggtcagccaatgattagtgagagattgggcccaaacacttcaagccagcaaaatctcccgctgagttgatgggtctctatgtggattcaggaaaaagtttatagttcagacagtttttagttcaggctgttttgcagtttctggtatctcctctgcaaaacacagaggttcctggtaagacagggatatgtgaacagcttggacttcttccagtctcccctgtgtgtacacatcacctccagtcaaccaagggtatcaagtgtctctatgactgtctcatttcccatattttcctgctaaacttctggttggcccattagggcctcaaccaggattcaacctcaggtatcaaaatttgttgtcctaattcccttgtctttgatattgttgcttattgttgacatctctgctggggatgggattgtccaactactgctccaaatcaagttattttcctcctacacttaagctgctattcaccatgtgccctaccatctaagaattaccatgaagaaaaatctgggggacaagaaggggagcagcccaggcaaaaatgccatggatttccacagttctcatgaaaatttgatagtttttctttaataagtgcttatcagtttgctgtaagtgtttggtcaatttccaggacactgtaatggttgtttctgatacatttgtctagttttatcattactgtttggagaaaatatttggtgacttgctcattccaccaattcattcgcctctttttttgtttccccataagctgcagcatcttgaattattcacttagatcccacaggccaccatgcctagcctatgcttcaggacacctcatatagcctagcccagtgctctgcaatgggccttagacatctaggagaagacagaattaaatatttttattattttgaattttcatgcaaatgaacctcagatcattgcttagagtgagtctctgataggcagaagttctacaggcaaaggacaccaaggggcaaagctgatccacaagagtggcatcactgaacacaacccatattccattttttgcttaagagcaagtagtagagctggctagttttcatgtgtcttttattttacagtatatgtttgagtaggtttgggtagaaattgctggtgagggctaatgctcgaaaatctacttgttactttctatgtacataatattcagggcactgaggtatgtgataggaaaacatcaggacacttgaggaatgattacatttccctacttaagcttttcacatatactctacagaaacattaatcttgagtatgaaaagccaaagctctaggtgtaggaattgaacaatgtttgaataaggcatttagtaatattctttgagacttttagagaagatgttttttactcaggtgtagctattccttttattttgattgccatcctctcctgaaaaagatagattattctgttaaaacagttactagagcatgttctcagaagcaatatggatctagtgggtggagaagtggacaggaagtttatgaaaaagtgtttgactctagatccttattcaaacatagtgtatccatgagtgtttatttttctagaatccatttattctctgcttactgaagctgagggtgtccttgtcatgcacaatactgtgtggttgggaggcgtgtaaagtaactatacttaccatttgtgtggcgattcacctgtcacgtactcatgaacactgaactggctaggccctcttctaccgatcactggcaggtgttgggggctgactgctgattatttgggtgtcagtgctgaaacaccttcctatcacatagcctatgcaactttggagagccttggaacaacagcagagaataagcatcacatagtgtgtctttccagtgtgacaggagccatacctagccagtttaacaaccattattcttaatcttcagaacaactccataaagtagatactgcgactgcaatataaatatgagaaaaacttgggcccagagaaatgaaatgatagtaaaatgtcataaggccagtgtattagtccgttctcacatggctatgaagaaatacatgagactgggtaatttattaagaattgaaatttaattgactcacagctctgcatggctggagaggcctcaggaagcttatgatcatggcagaagacacctcttcacagggcagcaggagagagaatgaatgcaaacaggggaaataccagacacttataaaaccatcggatctcatgagaactcactcactatcacaagaacagcatgggagaaacggcccccatgatccaattaccttcacctggtcccacctttgacacatggggattatggggattacagattaaggtgatatttggatggggacacagagccaaaccgtatcagccagtaagtggagaagaaaggtttgaaatttgatatatctaatggcaaagcctatgttttggtcactatggtgctcttcttccttgggccattcacggaagcattcagataaaaacattgttatttattcatccacttgttaattcagtatttatggggtgctcagtgtgtgccagaaccacactggaccttggctttgtccattctcctagctctttcaaatcatgattctacttctaaggttttctgttctttctattggctttcagaatttcctgaaggtcaggatccccagattagcagcatcagcatcacttgggaacttactagaaagcacattatcaggcctgccacagatctactgaattagaaacttgggcaggggtgtggggtatattgaagaagtagaatacattccattttttcaaaggccttagtagagctgatctatgatgaaaacccctttaagatgatggaagaagaagaacttagtgctcccttttcagaaatggtcccaaaatgaagaagggaaatccaagaaatttttgcatcacagcttttgcatcacatgggccatttatgtttgttccagaaagtaagcattcactaggaaagttacagtgtattcactgtcaaattgccttttctcattggatccctggtaattttgcccaataaggtactttctaaaagagaatcctgataattcttgtctttttccttcctcctttcttctctgtctctctttcctttttgttatcttctccctacttttctcttttttcatacatatattaaatatgtatacacatttgccaacaccaccaacttttttccccccagaagatccctgaggtaaagagtgagttacttaaaatataaaatgttctttttttctgaacatatgaaatgaatatttcatctgtgtgttcacatgcacattggcatgtataatctgcaagcatatgttacagataattgcccattttttttctattctttatcatcagttttaccactcttctgggggttttagaaacttttcctcaggctgtcacgctgtaaaaaatcgctttgaagtactaacatgtctctggcctaagagaaatcagtactggcaaatagaacaacaaaatgaaatttaaaaaaaaagaccagccacggtggcttatggatgtaatccgagcactttgggaggcaaaggcgggcagatcacttgaggtcaggagttagagaccaggctggtcaacatagtgaaaccctgtctctactaaaaatacaaaaattagccaggcgtggtggcacgtgcctgtagtactagctactagggaggctgaggcaggagaattgcttgaacctggaggtggaggttgcagtgagccgagatcatgcctctacactctagcctgggcaacagagcaagactccatctccaaaaaaaagaaaaaaagaaaaaagaaatttaaaaaaatctctaaacactttaaaatgtttatatattttttagtatcaaaactaccacaaggtactttctgtgtcttacattcagatatatgattagaccaataacaccttttgagaataataattattattatcctattaattagtatgatccagttctttataaaaggttacaacatttcttatcaaccctgaccctcacaacagtcatgggcagcgtaattgctcctattttatagataagacgaataagccacaggaaatttaagcaacttactcaaacctcccatactagggtgacattaaataaaatgaaataagtgaaatctaaaggggtttggcttatccttaatcttttatgcctttaaaatagccatgttttatttcattttctggaattgagggatggaaagtaaatgtgaatgaatacaggtaatggccctctaagcatgaatacagagttcaaagagacaaatattaagaggaaggagttacaatggctcagaaaaggcttctttgaggaaggttgcttaaacagacacacaaaatttgagtaggagagagctgcagctgcagtgggggtgggggaagaaggaggaatgctcctaccacagcacagggaaaagatcagagctttttggagacacttaaaaaaaaaaaaaagagcaagcaaacaaacaaaaaaccatgtctcacacacttattcaatgagtatgaatacgtgtgtgagcacatgaaaaaagctgcagaagttgaggataacaggtggaaaaggccagatcatgtaatgattactcattaccctcaagataagaaaaagccactgaagagtcataagcagggttggagtctccggtgggggagataattacatgatcatgtttgctatttaaaaagatcactttgggtgcagagagaatagattggaaaggggcaaaagctgctatctgaaggtgagttggattagaagtagtggattgtaggaacgaagtagacgtcaaagtcagaagatagatagtgaggaaaataaattaattagccttggagattaagtgcaggtggtgagcaaggggaactggtatgtcagtgtgtgactcttgataaagtaataaaagagctaagcaatgctatgatttgtatgtcatcttttacaactttctctttggatatgagaaaagatgcaatggtgggatttcttctttcagggcagataatttattattgtaatttaagatagctcatcattgtattccagcaatccactagattaagaacactgccagacttgatcttataagtcctgtttgcctgaatactaatgggcagattccgcactttaaaaaatctgcttttatgagtgagaatattaaacaaataatgttaattaggttactttaacttcctgttaaagatgtttatccttaagctctccaattagaagcaaataggaatattttcttccttccaatcatgacttctttgttcttttcattctttttttgtctagttttttttcattttgtgatcagagtctgtatgtttgagcaagaacaaaagtacaaagcaggtaagtaatgttctagacgttggtagaagaaaatactgaaactgaaaatagtagattccttctagatacacacaaacatagcacagaaagttttctttttttcatctgataacatgactgtgtcttgatgttgagcattctgtttcaattttttctgggatggggtgaggctttgaaactctagattcaagtcttatttctagaaaatgttattaaagcatactttattatttcctaattttttgttcttttcatgttgaatctttttattttggtctagatgactcatctatcaatatctctttaatctttaaaaaaaaaagccatttggtatttgctttgttttatttgcatttaataactggattgattttcctcaatccagttctcaatattttcagcaatttttattttcccatataaaatatgaatacagggctgtcatctgtataaatttttatttactctctatttctcaattccagaaagtgagataaaacatggttattgtgaaggcatcagagagccaggatagatgttgtatgttgtttcaattttgtttttatttttgtgacaattttttaaatttttccctctgtcaactcctattttatctctgtggtcttactatcttccatgagctattgaatctttgctttgtattcttgttttatagaggttattctttctttcattaagtttaaaaatgtataacaatatattcgaacataatgctttaaattgccttatggcaaacattttctggtgaatgttcttttcttgatgcattttcttttgttgtctccttctccatcttttttataatttttgtatggataaagtgttgacttctttataaaaattattactctaaaaactcaggacttcccagaattcaggattagaactcaacagaagctctctccttgtttctctctctttctctttttctctctctctctctgtgtgtgtgtgtgtatgtgtgtgtgtgtgtgtgtgtgtgtgtaggtggtggggatggggttgccaatgctatgttctatgccagtaggacattttttaataatagaattgtgcgtatgtgggtatttatttagactttgccactcccaagtcaactgagatcagcacttccaggttgctcacaagctgacaatacagaattatcttctttactctgtcttatcagtggaatgctccctgaaaacataacttgtctgtatgaccctttcttttcttctcattggaatcaaacgagattcagaaaatattcatttctctatgagctgctgccctcagttccattgttaaaaaataatgattgttggttttgacttgagaatgagcccttcatcttggagaagggtgcgttggtagtattttctgagctctgaggttgtggcttcctctctcttaagtctttccttatcacattaaactttcattgcttttatggttcagggcttcagatgtcttcttgttttgttgaagatggaatttgtgcttctgtttctcattctccttactacttttgcatgcttttaaaaatggtaactgggaaaggccatttttataccaccattctaaaccaaatataacaatttttaaaaaaattctctctaaaatttgaaaagaaaaagtggtagatcatcatttttttctgtttaatttacatttcctttaatgctagtcagtttatttttgaaatctttttctatttctttttatgtcttttgtttctcatcttcacacacttttattggtctttttcaatttgcaaaggatgttaaatcgttgtatgtctagtttgttgcagttattagtgtcagcttttcatttacctcctaattgtttataatgttttcaacatgtaaaagttcaatagttttgtattattaatattttccttttttatttcttccactgctgtatgcttaaaaactacattcctattccaacactagttaattttcacattttaattctatttttgtagttttactttttttgtttacctctttattctgcctggatatattttagtgtttaatgtgaggtaaggcttttcagttgacagttctccaagtaatcattttctcctaacatcattaattggaaaatctctgctgtttccagtgatttgtgatatttctatagtaagtggtttttactagtctattcttcacagagtgaggcctcacattgggtattggtttattcctccagaaggagttcaatactgtctcctgctctctttctgtccaccaggctcctggatgaccagaaatgttaacaaacagaacctgtccacctctggggccctgcgggtacccagtctgttaagttctgataaactcaagttaatgtctctcctgctccagctcttagactttctcaccattccataaagctagaaacagcatctaattcctccccccttgtttaaatgtactatctgaaagcagcatatttcagcttgtatcctcttctccaagttatctgcagttctgtcattgactcagtctcccggggaacaatacactaacatcctggtgagttctgtactaggagccagtcaatgcccccggatgaatttggagagtgagaggaaccctgatgggggttagggatgagattaggaaggaagaagggaaagattccaaatgatgaacccctgtatatcagaagtagagttaggtagaggtatgaaccaatcagtctcctgcacagtgcagagggtcccattttgggaacacatttccatagtgatcctaattcattaccagtcactgatactgcaattgttatacatttccgctagaatttgggaaatcatctttttccatcactctgcattcttgtttccagtgtctagtcattttcaatctcttaatggttattttcactagacattggagatgaagaatctatcaccatggaaacatggaattacaagtagtaaatttagatgattctaatatttgcaaagtattaggagaataaattattctttacatgactagatacgtaaatgggtttatttatttatcagttttgtattggaaatgttcattaacatttttatgtaatacaaatgatggagggaacatctacaaaatctaaattgtgggtgatttacacaggggcagggagttttattaatttgcatactcacagctgctgactacaaaccaacacccagaatcttcatttaaaaaattatatttatgaaaacaacctggattgtatgaagatcaagtgtttaatttctcaacaaggtaagaaatagtctcaaagacttgggaaaataaaaatgtaaaaaataaacaccttttagaaagatgctgtcatagcaaataaaggttcttggaatgcttttatacaatatctttttggaaagctgacaaaacagcatggaaataatgaatcagtataatcatttttataacgacttctcagaggtgtgccctatcagctcacgtgttcatgtaggaactcagtcgtaagcttcaaagaagagaattttaaaatattatgtttagagataagataattaggaaaggaaagtaatgttgagatcttttaaattaagttcttagataaatgtatatatacttctaggagactcaagagaacaaagaaaagaatcaaggggaaaggattgattgaaaagctttagaaacttgcatgtgatatttaaagtgagtgaccggatctcattcacaaatgtaatacttaaaacatgctcagtttcccaaaaccacaacgagataccacttcatacccactaagatgtctgtaattaaaaaaaaaaaaaaaggaaaataacaagtgctagcaaggatgtggagaaattgaaaccctcatacactgctagtaggaatgtaaaatgttgcagctactgtggaaaacagtttgacagttcctcaaaatgttaaacctatagttaccatatgatcaagaaatgatattcctaaatctatttctaagagaagtgaaaacataggtttgtataaaaacttgtatataaatcttcacagaagcattattcataatagccaaacatggaactaacccaaatacccatctattgatgaacagataaagaaaatgcgatatagtcatacaatgaaatattatttagtcataggaaagaatgaagtatttatacatgctacaacagggatgaaccttgaaaacattgtgctaagttaaagaagccatacaggggccaggtgcggtggctcagacctgtaatcccaacactttgggaggccaaggtggtggatcatgaggttaggagtttgagaccagcctggccaagatggtgaaaccccgtctctactaaaaatacaaaaattagccgggcgcggtggcgggtgcctgtaatcccagctactcgagaggctgaggcaggagaatcgcttgaacccaggaggcagaggtggcaatgagccaagattgtgccactgcactctcgcctgggcaacagagcaaaattccgtctcaaaaaaaaaaaagaagccaaacagataaactcatatatattatatgattccattcatatgagatgtccagaataggtaaagctgtagagacagaaaatcagtagtttcttagggctggggtatgagaagataatggagttataactcaaggtatttttaaggtgttgaaatgttgattctggtgatggctgcacacattgtgaatatactaaaaacaactgaattatacactttaaaatggtgaattttgtgatgtagttaaaagaaaaaagttctcaattttcactacaaaatatgaagtaactaaatatatgaaaatctacaaaatccccagataggtctaacagtccacctatgtattgtccgagtatgagagaaacgttcactaccttcaagacagataaaatgttgatgaaaaatgcagctggtagtccaacaatgctgtgtagctagacgcagaaagtagaaagttgtccctttctgttgctggttcagaaactcaaaaaactctgcacaaatagaatgatggttctcaaagtgtttgatctcaggattccattacattcttcaaacttattgaagactgttgggtatggtgccgcatgcctgtagccccagttgctttggaggctgaggcaggaggatcactttaacacaggagttcaaggctgtagggtgctatgattgtgcctgtgaatagccactccattccagcctgggcaaaatagacaccatcactaagcttaaaaaaaaaaaaaacttattgaagactgcaaagagctttcatttacatgggtaatatctattgatatttattaaattataaatacaaagaaatcttaccagatttgtatattaatgcatgttaaaataaactcatgtgttaacataaatatttttattaaaaattatattttccaaataaaataatttagaagactggtattattttacatttgacatgtaaaatagaatgacattttaataggatttcacaggagacagttgtggtcttatgtctacttctttgtttattctattatgatatgtttatttggttgagttttatgaagaaagcaagaaacatgcagatatgtagttggaaaaggaaggagtattttgatagcctcttaggataatcgtggctagtctttgatacagtatcaaaatctgactagtgatagttttttcaagcttagtttcaaagtagaattaaaaacccatgttaataaactgtttgaactcatttacaataacatccattgacctattttgcactttaaatgaatcttttaccaattcataattttgcaatatcatgcaactggtcatttggaaattattggttcactgtgttttatagcacttccaagtgttgacatattttattacacaatataaaaaatcttgtttgttaatatcaccacttattttaacagaaaagtctttttgtattgggaagttgttaaacttttggtggtgaatataagttttccaaaattctaatttttttctttctgaaagcttaaattttatcatcagcaacaaatacttttagttgttttctttgaagtgacaggctcgcttcattcatttttccccaaaaaagtctgcctgtcaaataccaaagactgaaaaaccagcttgttgctcttttctcaagaatgcagcttaaacaattgcaaggtgcctcgctttgaaacaatcattatatttcagtatgcagctgaggtgcttttgtgcactttccagttcatcacacaaaatattaagaaaaagtacacaaggggtgcaatttaaaaattttttataaattaatattttcaccattacatcaaggactttttaaagtgaaactggtcttctcttctactttttaatcttagtgtgagttcatggatactacacgtgtagcttgaagccattattaggatttatacctagataccagcaatttggtccaccattgttttgcatcctgaatacaaatgtcaacacagtgaaaaggcaaataatgtgtcagtactgttaaaaaaatacttattacaataatattatattaccatgaaaataatttttatcctgcagacctcctcagagtatctcagagatcttagagatttgcaaaatcatgctttgagaactgtcgaatgagaaaatatgatactcatggggtatcatattaggcagtttgaacacgatctaccttccacccacttcttaccttttatatacagttagactttgttattgccaaaagtgactacatagaaagtagagagtagaaggcaattgcccattccatcctgagctaggaaggttgccacaacagcacctcgtgggcctggctgcaagtagagccctagaatgcacactagtgattgtactttgtcatgtgcaacatcagagcgtcaggaagaggggaggagaagatccagttttagtccagcaaagccatactagataaaaccttaaaagatatataatcattagtgtgacagtggtcattggagggaaacactcatagaagggacaaagaaaaaatattagaagatactggggggctgggttcattgactcatgcctgtaatcccagcactttgggaggccgaggaaggaggatcgcttgagcccaggagttttttgtttgtttgtttgtttgtttgttttttaccaaaaaagagatggtggaggagtggggagaataagatcaggaattatttttaacaaactcctgttcactgtggatctgagaaacagacatggcgatcagcttcagtgagcttctggaatggggtcaaagtcacttattagctaagtaaatgatagtctggatagctttcttctggtggacagatacacagaaaaaaagaatattggactcatataaaggtgctacaagacaaaaagaaacattattatgaatgctctataatagcaagcctgtaaatatgatttacggtaaaaatcagaaggttttagaaaattctttggcatccttaaatgtgtatttaagaacttaacggatgtggcagctcatgcctgtaatcccaccacttgggaggccaaggcaggaggattacttgagcctgagagttcgagatcagcttgggcaacaattatagcagaaaatagggctaagaggaaagacagcagagtgagatgcaaaaaaaggagttccttgaggaaagaaagcatttcagtgacaaatcgaaattcacattagaagatgaaagtataggcttccactggcaaattaaaccaatgtgtaatgaaacacgtaaaactcttgcaaaacagagacaaagccacaggagcttaaacggatgagagagacaatggatatgaaggacagagaatgaagaacaatgcaagacttctggaagactagaagaaaagaatttaaagcaatgttaaatggaggtggggaatccctgagaaatcaagattgagagggttctctcagttctaagaaaatcaatgaaaagagacccaccctagagatatcttggtcattttttttaaatgacaaaaagaaacaataattttataaacatgaagcaaggaaaaaaaatattatttgtaaaagaacaagcagcagattagtttcaaaacatccccatttggaaataaatttcagtagacacttaaataatctcaatagaattttgagccaaaagtagcaatataacaaatttagttagtgaagacgcctttaatgtgtgaaggcaacagaaatacattatcagataaacaaggattcggctgatacaccacccacataatctcttttaaaaaattgctaaaagacagatgagatgaatcaaaatgaactaagggaaaggaacatcgtgaagtaaatggattgctgctgaactttgaagccaattagatatgaagcagactgaataacttagaaatttagttaagaaattgaatacaaatacaaaataatattgaaagaaaacattttagagtataaaatatttttataataatagtaaatttgatataaaattctgtattaaagacttagaatgagatgtgtgttggtggttgtataaagctacagaaacccattttcttaacacacatttcattgagaaagggtgcttcaatgatatcattatattctcaactatgagagttgaaaatgaaaagctagtaagtgtatttaaaatagtagttaccacttgaagagctaaaagcagaatataaaactttcaaatttttggcaaagattaatacaaacatgcacaaatgaaacaaaaaaacaaatgagacgcataaagaaacaaaaactccaaatgacaaatgaagcagaatgacagaaaataaaaataaaaattaaactgaaaataataataaaactacaaaaacaactgaggtaatcaaaataagatcaaatatattaattatggcaataaacatgaatgttttaaatttctctgtaagatatgaatagcaactttgcattaaaaatatgacagcagacatcttagttataagagacacacctaaaataagacataaaactggtaaaaatcagagaagaagcaaatatttgtcagtaaaactcaaacaaaaaaacccaaagtagaattcaggacaaaaagtactaaatgataaaaattccatttctattgatgggaagatgcaattgacatctaattgaaacattacacatcaaataacaagacttaaaaatacataaagcagaaattcttagaaagtcaatgcgaagttgattaaaaaccagcattgtgagaaatattaactcatcggtcaactttagctagaccaaggagacacaaagtaaataataacttaaagaattaaaaccataatttcagatgtttaatttatatattaggctcccttataaacatagaagatactttgatcttacgtatctgtagatcatttaaaagctgaccataaaacaagccttaataaattctcccaaaaaagaattcaaaaacacagtctcttccataatcggttacaattaaaaattaataatagagaacaaatttgtaaaaaccctccactaaatttaaaacatctccaaaataactgttgggtcaaagaataaaataacatcacaggatgggctatttattaattttaaaagtattaaaacatgaatatgataattcacaagatagaacaaactcataaccttacattctctcattattttttaaacggataaataaattcacaaaagtgtgaaaatcaagaagcttaaagacattgggtagaaagataatgaaaataaaagaagaaatcaaattctttaagttgataattgtaacaggtctttgaaaaagaaagccaataaaataaatatttgctaaatctaaacaacataaaataggggaaaaaaagcatgagtgagatagaagatttaacaatgaatatgaaggatgttaaagtgataaaataatataacatacaattccattcggatatacttgaaaatcttgtatatagatgaatttataagaaaagatgaatgatccaaattgaccaataaataagtagggtactactatagtaaaattataaaattatttaaaaatccctccaagaggaaaaagaaagaaaatatgtggctgctagtacagataattttactagtaaataatctcaaattttcaaaagacacatattcttatgcttcataaattattccagagataaaaaaatattgaaaaggactggaataattttataagccaattgtcttgatattaacccacaacagagcaattgaaaaaacttgtaaactagttttatttataaaggtatcaatgcaaaatactcaataagatattctgaaacccaaattcggcttgacagttaactcagaatattcctggatccgaagatgctttactattaggaaacttatctgcacgatactttaggttaactcgaaagaaaaaaagaaaacaactgataaaatacaacagccatttctggtttaatttttttggatgaattggaagtttcttacctgacaaagctaatctctcttaaaccaacaccaaatatgcttcaaatatcttacttcagtgaaatgcaagaagcattccaattaaaatcaaggctaagacaagaatgccttatatcactattgttaagtattattttgcttagtgttatgagatatgaaatagccataaatagtgaaaaggggacatctattttaatttgataaaaataggaatatatatgtgtacagtcctaagagaatcaaccgaaaactcaatagcttttctatataagagcaatgaccacatataacttgattatagaaaaagaaattgatttcattcacaatataaacaacacataaaatatttggaaattttaaaacaaaaatgtctgtagcaggtatggaggaaatgacaacatcttcctgataataataaaataaaatttaaataaatagaagaagcaagtgttgatggtaacactgaatattataaagatgacatttattccccccctttttattttagaatttgacaaaatgattctaaagttcatctgggaaataaagagctgagaatatctaagacgtttttgacaaagaagaatagcatatagatgatttttgccctattatataggttatataatatatgtagcatattatgcattatatatagtgtattatataatatataatatcatattattataacatattaatataacagaaatataccattaaaatatatgcattatacatcatcatatatatgcattgtatataattcatatattaatatacttatttataaatcatatttagaaatataaaatgtatatattatgtatatggcatatatatacacttaacgtatacacacatatatatggcattatatatcatcacactatatatggttcaaaaatagacctggaatttcattagaacttactttgactaaaaaaaaaaaaaagcaagcataatatgccaatggattattcaactaattatgctctaaaatttgattatttgggaagacgtgagatttgcatttaatgccatatacccattcaaattccagagactatagaattatttttaaactaaaataataggaaatttaaaaatgggtgtatatgcatgtctttttgtggacagggaagtgatttcttttcataaaagtaataaaataaaacataaaggttaaatatgactggataaaaattttaaaatcttttttaaaaactaacattaataaaaatcaaacggaaataacaaattctagaaaaaatatttgggatgcatacaatttggaatcagaattacagctaaattacattttaattttcactaatctcaatgtcatcatcaataaaatggggaaaataacaataccagtctttgttgttgcaaggtgtcaaaatcaagtatgtatttatagcccaggcagtgtgcaacacaataaatgtcagttattacatttttataattattgcttttataaatctatataaagttcaatgagaaaaatacttagacccccagtggaaagacaggtaaaggatgtgagtaatttataaaagaagaaacttaattagctaataaacttgaaaaatttaaccttggtaatgagatgcaaattaaaacattaataaaatgccactttccatctaataggttagaaaaaaattttaaggataatacaaaagagaggctttctcatacactgagaacataaattttccaccacctgatcttgaaggcaatttggcaatggtccacgttcttttaacccgtaatttcactcctgagaatgtatttaaaactgtcaaaattttattttttgtgtgactaattggacacatcttaaatcaagagattgcctggttttttgatagcccagccttatcaatgaaaataatttttaccatgcactcttaatatattgatatttatctatgtagttctttttatagcatacatttttgccactaaaaaacacacacaaaataaaattacaagaagtgaaataagaggagaaattctaatactttctcactgtacatcagtgccctgtctcgcaacatcccctaacgtgcacaggcctcattttaaagaccactgtccaagacctagttggaagcacatattaggcccttaataaatatttattgaatgaaaaagtgaattataaaagcaggatgctaacttgtacatgcagtctgattctaaaaacaccaagaaagataacagagattatatatacacctagtacatgcatatatatatatatataattttcataaatgtctacagtaagttccataatcctaaactaaaactcagggaaaatatggctttaaaaaataaatgtagactgtcaagttgaagagcaattttgaaaggttaaatgatagagtctgaaatataaagaatatgaaataaatagctcaagactccaaattttatagcccagaggacagaataacaggaactcatgaaaagttttcttctatttagaagttactacaaagctgtgtattgctgtggcctgctttctttggaaatgctgggaaacttgataactcttcttttctgattcctcagaatatatctttaggataggggttcccactgtttagcattcataaaaattttccaaggaacgtattaaaagcatagattgctgagccctgccctgtgagattcttatttagcagtttgaggaaggatccggaaatctatatttaaccccctgactcccctggggttctgatccacaggacctgcggatcacacataaaaattgtggagagtggaccaagcatctgccttctgtacagaatatagaacctctgcgacattgcccactgtgggtttgagtggcttagaatagttgacaatgggtggggaggattgaagttgagacttaaaaagcacaagctccttgccagtgtcaccacagagctaaaagctgcattgagacaagggctcttagaagcagcggtccctaaactgaggtcagtacaaaccattagcagctgaaaaggggctttttatcatgtgagactaggtcaaaaagcccagaatgccagggactgagtgttagagaagagacttgcttgggaaggtggagcagagggcttttccgggctgatgcccaggctgtgaggaagggctttcatgcccggagagtcccgcaggtgatattcattttctgacgagctcaagaccgtgcatggtttttaagtcccactgggaagtgacagattttattttagctgaaggaaataaaattgacccttgagcagcacaggggttggggcatcaatctccttgcagtgcaaaatccacatgcaacttttgactccccaaaaacgtaactgccaatagcctactgttgaccaaaagccttaccaataacataaacattcgattaacacttatttagtatgttatatgtattatatactggattattacaataaagtaagctagaaaagaaaaggttattaagaaaatcttaaggaaaagaaaatatatttgctatttattaagtacaggtggattatcataaacgtattcatctttgtcctcttcactttgagtaggttgaggaggaggaggaagggtagaagccagttttgctgtttcaggggtggcagatgcaggagaaaattcacgtatcagtggacccttgtggtgcagacctgtgtaattcaagggtcagctgtattcagataagttaaagtggcttttttaagactgcgctgggagctagtccagagtcaggaagaacagacttcagtgatgttagggactcactcccttcctcactggccacacgtgcccagggagctttggtaataatccaattaagcctgacaggcaagaaggaagcagccagtactggttctgcaaaggcagctaaagctgagagatgatttatttgattctcaaaaggaatttggttgatataaagaccgttgtggtaagatagtaagaaaaaaatgacttaaatttgaattttcgtaagatatgggttattgaattttttccctagttctatgagaataacagcttttttatggcccagtaaaccttttaaaatcttttatttctaattcaaaatgtgtctagtgcttaaactaccaggcatctccctccacacttctgcttttgcctccacacttctgcttttgcctccccacaaagcagccttttggaaggcacatcagaccttgtcatgccttgcccaaaaccctcaagtggttttctctcatgattggaattaaattccacgtccttgcaatggccaaaaaatggcctactagatctggccatgggccacttctctagcacccatgcccacccacttctcagccccaccagcctcctctccccaagagggcactaaacaggcctccagcgcagggcctttccctccacatggccttgtgatgctcacatgcccttcccctcaggcactgtggctgtgcccacgggtcccttcactgtgagacctctctgatcgccttatgtaagttacatacccacacccctccaggtcaccctatgccctgctttgtttttgttcataatactcgttactactcaacatcgtatttacttatttcgcttttgcctgtctctcccactgtaattttagctgcaagagggccctggacttgatctgtcttgttcaatgaggtgttcccatcacttagaggagtggatggtatatagcagtggtccccgtttttggcacgagggactggtttcatggaagacaatttttccatagactgaggacagtttcaggatgattcaagcacattacatatattgtgcattttatttcttgtattattattacattgtaatatataatgaaataattatataactcaccataatatagaatcagtgggagccctgagcttgttttcctgcaactagaaggtcccatcttggggtgatggaagacagtgacagatcatcaggcattagattctcacaaggaatgggctaccgagatccctcacacatgcagttcaaatagggtttgtgctcctacgagaatctaatgccaccagtgatccgacaggaggcagagctcaggtggtaatgcgagctatggggagtggctataaatacagatgaagtttcacttgcttgcccaccgctctcctcctgctgtgtggcccagttcctaacaggccacagactggtctgtggcccaagggttggggacccttggcatatagtactcactcaataagcatgttggataaataaataacattaaaaacactaccaaagccaggtatggtgactgacacctgtaatcccagcactttgggaagctgaggtgggaggatcacttgaacccaggagttcaagaccagcccaggcaacatggtgaaaccccatctctaaagaaacacacacacacacacacacacacacacacacacacacacacacaatatcaaagttaaatgagaaaaaatttctaacagtctttgtgcaacaacaaatcaaactgttttccactggattttaaaaatgtattcagggtttaaaagtctattgaggttgactatttttatatcaaaatttgggcatttatttcctcgtttatcttaacactaattcggatttttctgcttattttaattcaaaagatgatttcttgctgatttactttaacgaagtattcagcaggcttgattagagttttgcttggcatactaaggaaataagtactcacaagattggaacaccaagggcaagacttgcagacagagctcaaatctcacagggcatcaggacaggaaccagctgcatggagaaaggtagatacatgggcccttgtagttgaggtatgagagaaagtaggagaacccagcaatatttcatctctcatttgtgttgtggggaaacagaaaacttttcaggcaaagtgcatgcccctgtggagttatagtgcagaagctcagtggagtagcatgaaagaggattgattgtgtaatgaggctaaattccagccgtggaggatcaagctttcttggggcacaggtacatcagttcataggaacagacctcgcttacatattaaaatttgggtaattcagtcagcattgagttgttgtctttcttcaatctatgatgcatttttcccttaaacaatttgtctaagcaaattaatgttagcaagtggatatgggataagcccctaaacccacttaacagagccaattgtttatgaagacttcggctcacctgtttttacatgcttttatgaaggtgtcttactgacttgttaaaatgggtctgattttccccttgacaacacgttagccattctaggtgcttgaggatattaagtcagcaattctttacaaatacgcagggagaaacagcaactcagatgcttcatctgttccatccagcagtgccaatcttgaatggctgtgtggaaacctcgtttcactgtgtgagcttcagagtgtgagatggtgggttgtcagttgccgattatctccctaaaatgagaaacaaagcctagaaaaccagtcaaaactccctgcgtggagcgacatgtttatttattagcaaccatgatgaggtcaagacagtgcttccaagagagggcattgtgtttgtgtgtgcacatgcctaatctacatacatagaacacattgcgtaaacatgatcagggtgctaagaaaatgttattactgtgaaagtagacaggcacaaagaagatgccgaatacaattactctcttccctttgctgatgtctactagatggtgactttttttatggtagctaatgtttctagatctttacatttctcattgtccctagcacaacacctggtactgatgaactgtcaataaatatttgttgaattgcatcagttttgtcttaagtaggctctgattcagagccatccccaatccatgcaaactaaagaggatgtaagtaaatattaataaaggctggcctggttttttaattgccctcaatttcaaaggctagagatttaaagaaatatttacttaagcctctgtttatagtttgaattggaaacaaatctgcaaaatatttttaataggagctaatacagatagctgacggaatggggagaacctattaaaaaaaaaaaaaaaaaaaccttctagttcatgttttcctgagcagccaaatccccaggaatgagaagatttagctaatctttccaatcacattcttccttcctccccacccccatctccttggaattatgttatctctgctcgtcttaaaagctcagaagccttttgaattggagtggcattcaaaggacagtcaagggtcacccttggaatattaaaggagagtggattacaagagagggagggacggagcagctggcgctgggcgcagccgtgtacagacccaaggcagagaacgagaggaaaactccatagtatctggtgctggccaagagaaagctgcccagactgctgggaagcacaggaagcaacgctggagcaaccaagccacattagcagttcccagcgtgtgctattgcagcttgggaacagagggaaggaaaacacttattggtgaaatcaattaggcagtggccttttgaacagaagtggactggcttatttagagaatgtggagttgtgaaccttgtagaattaaaagccagatactgttttaattcagagagaaaattctacagaatttacagcctcctgatagttacttatttcttaaaatcataagatgttaggatttatagagtttccttctcaaaagacttctgagtaattttatttttaaaaatctaaattggccgggcatggtggcttacgcctgtaatcctagaactttaagagcccatgactggcagattgcctgagctccagagttcgagaccagccagggcaacacagtgaagccccatctctactaaaatacaaaaaattagctgggcgtaatggctcacacctgtaatcccagcactttgcgaggctgaggcgggtggatcacctgaggtcaggagttcgagacctgtctggccaacatagtgacatcccatctctactaaaatacaaaaaattagctgggtgtggtggcaggcgtagtcccagctacttgggaggctgaggcaggagaattgcttgaacacggaaggcagaggttgcagtgagccgagatcacgccactgcactccagcctggacgacagagtgagacttgtccccccctcaaaaaaaaaaatctaaatttaaaaaatgtctttcttcttttatcttttatagatatcaattcttatttttgtttttcaaatgaaagcaatagatatttagtgagagtttattatgtgcccagcactgtcctaatatttgaagtgtgtggatataaagatagtgtatcctttttagcagtggtttcttgttgaatttttttggtgggatgtggggtggggagcagatcaggcagcagatcatgaatccctttaaaatctgatgaaggctaaggagcttctccacaataaactacacaaacagtcacactttgtcggaagggtcgcggacagcagggagcaagcaatatcaaaatttcttattattactaagcagtcggcctgctatgagcactgtttgtgaattatttatttaatctgctaacccatccatcccatgaggcatatactgttattaccccattttcctctcgggaaaatgaaggctcagagaactgtgcccttcagtgagtagaaggtgaacccaactacaggctcttgggctccagttcccaagcacccactctggcaccgtgggactggggtgtggggctgttcgaggtcgcaggtgaggctggccacagactgtctgttataggtcaaaaggcatctctttggagctagaccaggaagcacctggacacttaattgccacatgacagaaaattgtcttagcaattttaccatcattataatgtgaacaacacattccctggtgttgaagtgcccggtccaatgtcacagcccaagaaagctagaccaggctccaaatggggagggcctggcatggtgggttggagttctggcccaactcagaaactactctggaaacagtcaagttttgagctggatttttaggaatattagtctgtcagcagggggcaggatggatttttgtatttatttatggaaatctgaaaccataaagagctggatggtttttgaagaaaaagtttttcttctcaactttgtcatcagaacagaaggacaggattagatgtatacacatatttcatgtaatattcatttaaataaatctcttcttcttctaagaaaaatcctaccaagagaacacttgtagtaaaatcacgcttctaatacgctgtgtgtttgatgatactgctcctgaaggccacagggaggctgggaccacagttagtgctgtagtagtgctggcagtggccagcttccctcagtgacatgaagatgcttccagctgaacaaggagacagagcccaaaggctgagcccttggggcgtggtctctgtgcacacctgggttcccctggggctctactgcctttgctttgttggactaatccccggactagcttggtagtagctcttctcccattcaacttcagtcctgggggaaaatgagactttccttttcctttccagtgtagctatgacattcttccatcttgtcctgtgttacaagtaatgcagtcacacaagctgaactcacttctgtttctggaagcagcatatgggtcagtatgtatgtgtgtgcagagtcagagaggtaagatagctgggtgaggcctcggcttcatattatgtagtttcagacacagctgaatgtatgctgaaaatatcaaccaaagctaacctttgctctgaacttccctttttcctttcctttctcccttttctcccttcccttcccttctcttcctttcctttcctctctccttccttccattccttccttttcctcccttccattccctcccttccttccttccttcctatcaatcaaccagtcaaacacacttactgagagcctattttgtatcagacatagtgcccagtactgggaatttcaacacatgtctgcctgccagggactcaaacatctcagctgtagggtctaacacctaagtgttttggaaaagtaaatcattgataggtgcagcaaaccctcgtggcacgcatttacctatgtaacaaacctgcacgtcctgcacatgtatcctggaacttaaactaaaaataaattatatttttaaaaagaaaaagaaaaagaaaatggttagctaacagacaaagtatcatgattgttatcgcatctgtgatgcattgccaatatgcaatatgggcagatctgtggaacgctttcctcaagtacactaaagactccatgtaaaatagatgggaggagccaatatggtctcaaaaactgggagtgggcacttaggtcttcccctatctccctttgaggtcctggaggcacctctctaaaaccctcagggcttctcagagcagttttaaaatgctgggactagagaacaggtctttccattctggaaactatctcacttttgcaaaaggttgcaaatgttgagatacacacacacacacacacacacacacattaattaacagtctctgctagagtttttaagatgctagaaagtaagctctttttaggacagagatcagatgttctctctttgtaactcccaagcaactctacattcaaattgctaaatgtaaattcactttaatctgtgttgtattctgattaaatcctgatagctatttgaagccatcagattatgaagagtgtatgaatatagggtatgcgtatgcaatgtcaatactgctgtataaccccattaccaaaagaccagatctagatgagcctggattgaactcatattgatgctttttcataaaggcagcagaaattgaattgatggtgctattaggttgtcaataccagtgtctccctttcttcccagataagtatacatgaagcatggttcatacagtcattttaacctcctagggccaaagaagcttgtagaggttcaaggtgaggattccgaggaggtgtgtccaactgtgtgctagatactttgtagaagtccagaactggcaaactcctgtctgattgattgttatgttgttatttcagtctacaggtttgcattgatgagcggtttggcttaattgcttgtctgtgtttaaatacagctgcatctgttttcattatcaattggagtaggctctagagtataagcatagttaagaggacgtggcattcatggtgggacttggagagggatagagaccctgtgtggatactgacaggagaggaggacacttatctgaggttcaacaaaaagacaagagacccttaaactgcccatatgtgcacactcattgttagtaatgaaatagcatcctgttacaccgaaggaaatcctatatttgctgtattattttttttctttcaagatgattctggacattcaccttaaccaaatattccctagataaagtattggggattagtgggaatagcaaatagtataatttgcctaggacatccttttaacagaagctctagaccttattttaccgtgtaactagcttgcttgcctctaatacagtgttcatctgactaggggtcatcacccggtgcagtgggttgtgttgcagatggcctggggcaacacttgtatgcacaactattaggttatttttggtagataatggtaggccaccaaaactaccatatggttagagatgagtgagggtttgctacatcgtcctcaaagccttgcattctggttatgatgaaaacaagctctcagaccaagagctgccacacattcagatatttattaaacacgcttttattgccaattatttccaaatagtttacttgacttgtctgaaagcttaatgaagtcatagttctctgtcattttagatgaatctagcataccttgcatgaaggttcattaaggtagatatggcaaagttctaggagcaagatctataagcacaggcaaaaacacttgctagaccattaatattctctgcttgcatacaaaggtggggaaggtctccaaaatattttagccaatacacatattttgaatatgactaatttaaccaaatgagaacccatttctaacctccattaatgctggtcaataaggtactaattctacccaaattaatataaatgatactaagcagcaaaatgcagggtgaaggagtggtggtcagtgaactgtgtttgtagtggccacgcctggaatgtggcttttgtgattgaacgctagtattggagcatgaatatcaattaaggcaactgatcaaacctggggcggagctcacgggtcagcaaactttttctgtaaagaggtaaatggtaaatatttcaggctttgcaggccataaagcaaaatccaggctgccccagaggaacagatatgaccttgagagaggcagctactttcaggcaggagcaattcctgagaaaggactcctctgctgtgagccattgaggggcaacatgcctggctactgggaaatgagtgccttggttctaaaggcgccattgcactccagcctggcgacagagcaagactccttctcaaaaaataaaaaataaagggaggatctgggcagtaccccacagcatcccctacagcatctatttgagtcttcaacttcaatgatttggtgactcgtgctccaaactgagagtgtggagagaaaagtaactcccagtcagttagataccttaatgtgggaagcggtattgtagaaaatagtctatttgtgtaatacttttatatctttcaaaacatattcatacacattatctgtacattatctcacttgagtctcacaatatcttttttttttttttttttttttttccgagacggagtctcaccctgtcacccaggctggagtgcagtggtgcgatctcagctcactgcaacctccgcctcccaagttcaagcgattctcctgccttagcctcccgagtagctgggattacaggcgcccgcaaccacgccccactaattttttgtatttttagttccaccgtgttggccagactggtctcgcagtcctgaccttctgatccgcccgcctaggcctcccaaagtgctgggattacaggcttaagccaccgtgcccggccaagtctcacaatatccttcacgggatatagaaagccacattggtatgggaaccaagatggaagagagagcaattcatggtcctgccagtaattagcgctaaaacaagcaatatccatggggtcccctctttagtatgccactgttaaacgcagcatttatttttaattttgaatgtcctgcttgattttcacagaaatcttatatattttgggataggattaaagaaaatttcagccacactaactgcaaaatggagagacacagagaaagagatagcagttgggaatgttgagttgaggaaggaagtgcatgctgggatcaatatttggctgtgaaaatctactgtggagcaatcaaaggtgtgcatgtatacgctttatagtgaagtgcattataatggaaatttttgtctgttgaatatttgccagaaatgtgggattttccactttttttccaaaataatttttgtttgcagcccaaaaagtgaaatttaaaataaaataatccgttgtgggtgaatttataatacttttagcatccttctttgatcttcccaaattttcaaaatgttctacaataaatacgtatacttacgtcaataaaaaacacataaaaataaaatatggtcttatttcagaaagtcaaatagaagttcttattttaaaaaagtcctgaaaaggtaaggaaatattgaatgatgaaaaattagaaatgttttataacttttgggagaaatactcatattaaatatcatatcaagagctaaactaattaataatatttggtaattaataaaagaaagtttgtttttcttcatgactaaggtaatgatattcatacttgaagttaccctttccccaaacctaccaacgccttgtttcttcctcttaattctttttgatttcaatttttacctcttctccgtgggaaaaactaaacacaaaatatgacggtgtgtttgcatcttaaattggatgtaggtaatttgtttctatcctttctcccaagttgaaatgtagcattttgagaggagggaaaatccaatacattttttttctttataatgaatgcaatttttctattgaattctaggaataaatctgttgtgtattgtataactttaccatacttgagtgcttcacaaccaaatgaattgtttccctggatttttgaagcctgcctgtgttatttgcattttcctcaaagctgttctgatggactgtttcatcattagtttgcacgtacataaaaatatgctggacctctttcaagctcagtgtagagagatgtgggtatttccatcatgtggctgccactggacacggatgctttgctgagttaattatctcgctatctttagtttctccgactataaaatgagaatgaatatgcttatcaaaactctgttggttaaattattgaaggtctttagccaaattacatatttgtttatgtggtattatttttagcagcgtggttaaaaaaacacaaagcccaagatgaattctccttcttaatacagtaccccatatctactctttaaaggctttatgatagaagtacactgggacatctctatttaaaaattatatgaaagtacatcagaagttagcatataatgacagtatatatggttagtatatagtaaatcatatatcatatatgctaactacacataaataaactaagaaacattaattaggtaaaagttgttagaatgtgagaagcactacacaaatatgtacttgtagaagtgtttgagtttagtattatagaatcattaaaaattagtgcagtaatttacagataatcgaaccttgcccattccagatctattagataatataagagttataaggcaaagacctcccatggtcagataatcttgggaaagtgctagaataagaaagttagatcgacttctttcctggtagacttccctgctgagttttccacatgggtatgactgcagaactctttcattgtagagtatcttttggggcaagtgttttgtggaatgtactttgggaaatattgttttattatagccttttcattttctagacaagaaaaccaaggccaaaggtggttaagtggcttgccatgtttatctagagggtgaagctgaatgcaagcctgggtattgaacactatctgatgtcctgtctactataccatattgccccatagacttcattcaagcaatgtcagccagagagctgttttgttcctacattctgtagggaagataatactacacacagtatgtctgggactaggttatccaggctttaacacccttcacagccactggctctggctcatcatccaaaatctgggataccccatgaattactaagtccataagccttgaatttttcactcaacgcctactgggtaaaaaaggtgctgacttttggagatgaattggccaggtttgaaaatgcagctttaccacttagctgcgtgcctttggggcaagaaatttagcccactgagcctccgtctcttacccatacaatggggctaataccttgcatagctggggtaacattagatccatctgaggagactgtctggtaaaggcattcaataagtgggacctatatttattccttcataatgcttgaaggagacagataatcactgtgtagtttctgatggagattgcaatcctctctttgtaggacacggtgaaaatttttgttgtgattttgctaatagaaactacttctgcttctcctttttccaccgtctggttcttgggtctctgatggccccgtgagtgtcctgtattggcacatgccacatcctattgcacacatgcaatactgttccatggtggactagtcactttcttctgtcgggattgataaatgaattgcaaagaagtctcaacatcttctattgtgatagtaacaatttcagagtttcaagtaagaaacttcatcagctctattttacttctcacctgcactagctacttctgttcctgtttaccgctgcagagatccttgtacaggttgaagttgcaggtctcttacatttctacaagcacctacgtagatgcatgttggaaaatcctctcttcactacgacagaaaggatttcacagactgctatggctcttggcagagagagaatgacttccaagccgagtgctacttgaaagaggcactcccccatcacttataagtctgtactcactggttactgcttgtgacacattttcaaatggaccccccagtggctgcagctgtgattaaaagctgtctgctctctgcctcactaggggtttgctgtttaaccatgtcatgcacacacacacacacacacacacacacacacacacacacacaaatatatatatgggctagagctgcattatggaaaacgtaaagtgttttgtaagacaaaaaaaattaaatgagtacttgaatgacaaactcttggattttcaaagctcaagttggtgagaggcactagttgggaacctagccatgtatgaggtacataaaagtaatttaaggaagaagagctaatggtcagtgaacatataccatctgccagtgcatgttttgcacacatcagccagacagaacatcttaaagatttaagtacacttgaactcagcagctgcatttcagctcgtcagtgtgattcgggattcagtttgacccttcacaaataaggcaagagtagaatattctttcttaagtttacccagatattcactggcacattaataatcatgtctgttttatcataagactgctattctcaacataagtttatcattaacattatcttaaaaaatgctcagatgagcagtacagtgacagagactgggtgtcttaaaggtataggtcacaccccttcctctagattagagagactgaggattcaaccttttaaaaagtaaaaagagtggactagaatgtaagcctgggatcttgacatcacatgacgagtatacttaggaatgccacgaggtcaaccaatgagcgttgttcccttccctacccacccacccaccaactgaatcagaactcgaacatgcatgctttcttagatatttaggaaagagatccagagaaatcttgagaattgtgtgtctcttttcccttctgcctgcctcccccatctaccccaagtttcaagcgctccaaatcccagcaacaagacccagtaaacaaaatgcaaatctatcactagcaaattcaagctgacaatactgtgaatcgaccgcattgattacattgattatatttcaaatatttacaatatggtgagacaagtctaatttcttttctaaagagttcaaggtaggtatcaccatttctgaggggggaaaacaatggagaaatgtttgtggttgctatctgcaataatctggtgctgacagagagtagtattttatttagtaattaacagtgtaaaggggaaaggagctgtcatgttggttcttaagctggggaatgtgatgaaagatgatatctgcgatctcatcctttccacttgtttaggattgtcaggatgagaaatgtcagcattatgaaagctcggctctgctcttgatatgataaaacccttcaaaagccagtctttctctctccctcatccccctcctttctcgctgtctctctctgcacttgcttttttatttatcctgttttgttagatggcagaaatataattcttttctttcttcctattataagccaccatttttgttttattatatgtttcacaacccctaatgccccactgaaaattaccttgttaaatgacagtgtttcaaagccatgaatcctttccaccattccctcagaggtttgaaacagtcaacagactgtaaagaataaataataaaaaagtattgattattttgatgactgtgagattcaattaagtattaattttgccctccagtggacctatcaaggtattcaaaagggaggattcggctcagctaaatgcgtgctgagtgcttcagccttaaatagggagaaaatgtgtttacctacagtatttgaagaagaagtgcattgatgcacagagtccaatatttaagtgctgtgtaaattaagccctggtgacagtgacattgttttcaatggtatgagtattgactaaagaagtgcatttgatgacagcttaaactatttgtattgattaacattttcatagattatcatgtgtcatatcaaattcacttttcaagcatgaatacattaaaaaaaaataaaacacaggcataccgcaaccaatgcaatggtgggacccgggagcatgccgccccacctgcttctgtgctggtcacctgtttcctgctcaggaaccatttaggcatgaacttggcaataaatagctcccagatctcgcaaaaagggcacttcttgctctcctttccttctgcatccgatattgtgccaaaacaatattatgcatctcagtttgcaaatggaataaaagactacacttggaaaatatttctgatcctaaaatgccctccttaatgagctgaagataaagcagatctaaataattaggggggaaagtttgtcttttctgaaggcgatttttgttttctttttctttaatgctctgggtgtacgatgctctaggtatccgaattattgaacacagtttgtaagtattttcccaattccttaaaaaaaatttaaatcaattttcgtgtattgtgttgtgtattatttgctttaaaatgttcatttgatttggggtcagctccggttcccaatctgggaccagtgaagccaacttctaagggtgcttatagaatttacataagaaatatcttttattccattgaaagcctttcgaggtctcttttctccctatcttttttctctgctcttgggatagggtttaattgcttctcccccggggagaaggcttcttaaaatagcccgtggttcctccatagggtgctcttcctttttagtatgttgctgaagtacaaacccagcactttcttttttcttactgcattaaagacagaacaaggtgtaaaaacattcgcacaaaagcatatcccacaattaaagctgtgttggttaggttgctttcaaagaagttttttttttttttttcctccgaagcctcctgaatctctcacatgctagttgagctttaatagggtggggagtaatggagaactcatcggatctgtaatagctcttcacttgactgcagccagcaataacagcgggagcagccagagataagagagagaggagagagggagagtgtgtgtggaagagagagagagaagagagagggagagggagagagaggacacgcactctaaatctgccactttttttttcctccccttcactcttttcgcccatcctaggatccaatgatagctggacaagtcagtaagcccttgctgtcagtgcggagtgaaatgaatgcggagttgagaggtgaggacaaggctgctacttcagacagcgagctgaatgagcccctgcttgcgcctgtggaatcaaatgacagcgaggacactcccagcaagctcttcggtaagtctgtctaggtatttcatttcagtactaccatgttgtccggaagagcaatccaacccccccaaccccccctttttttctgttgttcattcagttttcccgtaagtactaaaaaggagcatcttggaggtgctaagccactgaagctgattccagccggctaggaggatgtcctccaaacttttaccaacaaggaacttattcgctgcccattttgacttgtcaaatattgctagagtccccaggctggaaattgtttggaaaaaaatagaaagtggtaataataatcaggaaatcggttccattgtgagaattggttaacatttattgagtaaatatcgactcggtttcaggttgcttcgcagccttttgttaaggggaaggtgagtaaagacattatctatcgtctaaagatgggagaggagaactgaaaaatatcaatacaagtcgtgctatgccaggtaaacaaaggtggacacaggaattgctctgagaaataacattgtgtcatcacaatcagaatgaatatttcttctttttttaaaaaggtgatgaggaaagaaaacaggttctctgattccctcctctacccctctccttttccacattgtgtttatagcatcataactaaaagtagaggcagcccaagaccttttaggaatctttgtttcataaacaaaacaagaacaagcagagtgccactccagcaaagacatctgtcattcaaacagatgacactctgtaagccaactcatgcaactgtgatctctaatcagaaaggggagcgggttgttgaggcgcgtgcctgagtgatagatgttaatggatgtctctgctggagaagcactttagggtacagagtgacgttaggttttcagaacaattgctcctgaaacgtttgcttttaattattttcaagtgcgtgtgtgtgcacacacacatagacatatatatacatactaacctgacatatatatatcaggcagagtactgcttggtctcaggtaagaaacagtcaagcacctgaacttcaaaaaaaaaaaaaaaatcattacatagactactactttgttaagaaagtcagcaattcggcttgaaacacaggctttattaattaattaattaatttatttatttatttatttatttatttatttatttattttaaccgacagaaagcaagctgccctgagagtttggcaactctaggctagcgtgcttcaaccgacaatcttttccctaattttaaatgcttactcaatcaaacattagagagatgtcacagagaaactctgcttttcagatcttctctgggtacaatactgttttatgcttaacaatatactagattccaatttcaagaaattttggtagcatcccttctttgaaaagcagcaatgccacctctgacatgaatttccaaacctgcacattagagttttagcattttcaccctaaagaaatattttttatagtgtaagtttttatccatataggaagaattatgtactaaaacctttacttcaattttaggagggtagtgagaaaagtcagataaaatgataaattacagaaaggtaaaagccatgcccatgcccctctaatgttgagtatgctaagtaagcactttgacttttaaaaagtaatcaattttgagttcaacaagctacagataatacatttttgttcctaaactttgcatgcatttaaaataaaagcaaatggattttgtagacttgagcttggacctctaacttgttttctttcaagtaatccaaaagaggggtgattgatttttttcatttgtttagggttcccagtgttgaacactgttatagatttgttatgctacgtcttactgatttgcatgtgtagagaaaaaagcttcaaaattccaagagggtcaaagagatttgaattaaaagtttaatggcatttactaaggatttgtagtttaatgttaaaatcataatggattttagaaggaatccacttttcattttgaaattctcaacttctgagtttgtgtgagagaacacagcaaaacctacatcttacattccttttgaattcacttaattgtctttggtctctagactgtttttcaaacacaatgtgagaatttcccagtttccaattagatcaagaagaaagcagtagattaacagttttgagaacttgagaaaaaattagagacaatatgagaaagaaagaatagaaaggatcaggaggaagacactctaatattctcataaggtttcctttgcaggggcctgttttgctcttactttttaatattactgggacttggccttagcaattctagtttacgtaactgactaaaactttccagaataattctgtcccagaatttttagcaactttggtgacacaatttaaggaactatgattttctttgatatgcatatgttcaagtctgttttttgtttttagatgtagtcctgattgtaccctttacttgataatgaagaattgcattcttcctgagtagttgacagcatctatgtttttatctaaacaataattttctaacatactttctttctcaaactgtcattcttctatatatacaccgtattattgaaaattgggcttctctaatgagatggccagattatgacaaatcatgtgcatcttgatatgtttagtttcatggagagacattaaccaacaacaggagacaagcagagctcagggtttttttattgtacctgaaatttcagtataaatggatttctttgaagcctcttctcccatctgtgtactgttcaaattagcagtccagaggacaagtctgtttccctcacagtatggtaccttcagcccaaaactgcaggagaagggctaatactgatgccctctatggataaacaaaggaaattccaggaaccactgggccttttatgcctctccttaaattgcacctctgcacttaacagcatccaaagggaaacatactgtgcagaatgtttcagtgctctgagcagctcagaataccagaaggagaaaggagaagccatatgccagcctaagtagaaagttcagaaaagggcccttgtgttttataaagtaattacatcagtggtaacgttttgcttaacttgaacagccatggaaactaaagtacacttaggagagatgaatccacatttcactgagaaacatgtggttaggtagttctctgtgatatcattaagtgatgcattatttattcttctaaagcctgtaggataactatctcctttttcagttcatgactgtattatgctaagctctgagctgtaagaaacagtatagaggagaacaggcttgcatgtggttgggggtgggggattatcagagaatctggcgctgtgtctcacagggctttagctgtgtgatcagatgagtgatgctacatagagccagtcatttaatatgtgactagtgatgtacatattggaaaccattctcaaaactggcctttggcaaacaatcttaaagggaagaggttgctgtgtttctctagtgacatttatagtactcgtgtcagtgtggtgcttcacttttagttatgcccatcaagaattcagtgttccacattcagtcaagttggatgctaaaattcaaatggtagcatcaacaacttggtcgggaaaatgatcacagaaaggataaaagtaatatatatccttggaaaaaatatgtgtgctaaagttttcccatgcactctcagccgaagaagtgagatctcataaaacatgccctaaatattttctcccatatatatttgagatttgaaagatgatttattaacagtgtttctcctgggaaaatgtttattgtttgaagttaaacctcatgatttccttcctttaagtcccagctatcttgggtggctgtgttagtctcggtggccggcttctcagttgtactacattgtgcatgaattgggcacacagctaagagccttgagctgagatggaactgcaaaaccacgtataagcattgcatccaaagtaaaaaatttgtggttgattttctcttctgatattgtgctttcctaggataaaagaaattgcatgcaatgatacttgtaagagtgggtattttcaatgccatttatctgtgagctgttgaaaaaggccttaaagttggctcagggattcctccatgctatagaatgtactatattgtgtatttcttttcctttctgtgatctttctcacagaaacatgcattataagatttttttctttcaaattgccatccagtttgacttgattagaatttatggcagtagagtcgctttcaatgacaaaaggataaagaactaaattgtcaccccttgagacagtggtctctgcaggtcagcgtggaggtcattgcagggcattatggggactgcacttgggggtgaggctgcctcatgcccatgcatcagtggaggccttcattatgggatcactgtcttcattactttatttaaacgtctctctccaggcttcagtaccttgggtatttataatattctgattaactattctggagccagtaatcagtaccaagagcttaaacccaagagggatttagcttggaggtgatgaggtaaattccctagagaaatgtatttatttaaaatatgtatcatgcttctatatttttaaaagtttctatatcaattgaaaatttataccccttttcaccaaagaaagttttgctaaagaaatattaaaagtgtattttttaaatcaactaaataatttggtaatagatttatgcaaaaactgttatttaaaagaaatctgtagaaacctgtatttgtggaagtaagtgagatgcataaggtatttgtcaaaaatcagttatggtttaatagtcaaacaaacccttgtcatgctgctgactacttgagtgaaaaaaaaaatgcacatttggatacagttcttccatttaagaaaatctaatgcactggggtatttttaaaaaaatcagtgagaggctgtgtgcatttggacaattttagtttagtagattccccgccccgccccagaaaaaccaccgtaatgctgcattgataaataaatccactttaaataacattcatttgtaagctttgaaataaaaataaatccatagagagaggcactggtgttcaaacttttcaccatatttgtttgtggagctgctcatttctaagtgcacttcaatgggggacagtgcacaatatgtgtcagaatcgtcagtggggaccttcccttgtgcctgcctttgctagctctttgctatgcctggggtgctcaggccaggcctctgtttaaagcaggaagttcaatattgcagtgtccaaggatactccatggtagcacattagcaagtcaaaatactgatatggttttacttttttctccccttttattttgattactgtaattcttatattttgttgttgtcattaaacggtcctaaaaacaacaggaaataaggtattagaaatgagattaatctgtacatcatccctcctttaaatgatcccattttagtctcttgaatgtcttggatgtttctgacttaaaggttacatggtattacagtgtttttgtagttcacccagcccagtttatgtcataattaataaatagaggtgcattccagattcaagctcccaaggctcagcccttaagaagattgctttcgctcttaattacctgctttaattatacagctagcattccccttctcaagaattgaccaaatacgtttttctcccacttcaacgttgagatttcacttgaccgtttcaagtggaccttgtttgttatgagacagccaacagttaatttgtgagagaactggcactttctttgattgacgaccttgctggtttatatttggggattaataatacatcagacattcacacattaaagagaaagtaaatgtgaagaggaagggtagaaggttcagttctgctactgggctgccctgattattcaggccttccctgggaatgcagaggcaatcggagaagcaggcacatttgcccaaatatgcacctggctccatttaacatgtttcttgattttttatgctaaagaaaaagatagcaaagtgtttataccaaactggcaccctgtcagggggcaatctgtataaagtttcccgctgtcaggttaataaatttttaaaaaatatccaaaggcagaggtagctagagaaagctcatagtaacagttgccattctccagcggatgggtttctctttaatatccagcctggctctggaattttcttgtttgttgtcttcctgggttctgtacttagctggtgtttttgttcagcttttcttttattcatgccatttcagtcttactttttaaatgtttatctttttaaatttcaaatgtcttttctttgagaaacaagtaagcataatttgttttaattttttatatggtattttgtagttgaacatatactttgtcatgctatgactctgaatgagcttctaaatctatcaacactgggcttttctttgggaataccttcaagtaatatttattcataaaggagtatctgtgctttgacaatatgggggcttctgatgaagtcgattattaaacatgttgatctgattcttaatcttttcaatgtaaactttcacctcctgattgtcaaagtcagatttcataaaaaggaaacaagggtggacttgtttggagacatctcctactctgtgctgtgacactttatgagctatcaaaaatggattaagcccttttagtgtgaatgcagaggtcagaaagaataacattagatctcttgaggctaaagaaagtttgtcattcgcagagaaatggaaattaactttgttttataagtattccaggataattttttaaaactacctaaccaagatgcatacccccaagatcgcttcttaataattagcttccactttaaaaaatttcctagtatgttatatgaatgtctatattttatttgaggatggaaaagaaaatccatgcccaaacttctcttatagtttttccttcttaagtgattttaaggtcttatatgtaacaagaatatattgtgattttttttaaattaaaaaattagctacctggaacaatataactaatagtcaaagcaagtcactattattggaggaccacactgccattaaaactatttgaaaatataaggggaaaatgatcagattataattagagaaactaagtaatataattatacatgaactaaatgcttcagagattttctatacaaaagaccatttgaaaatgggactgtataatgaaatctgcattcattaagatggttaaaaatgttcttagtaaataaccaaaataaaacctgttagtttagctcacaaatgaagtagaatatgaaggtatttttaggatacttatgatgtcccaatgatagccaacatgaaacagtttcacaatttaatgaatacgtgtatcctgccatatattgtttggcattaagtagttttcttagtgtttcatcttttcctgtaaaataattagtgtttcttgggattgactgatgtaccttccaaatattttgtatttctttaatttcatcctattaatgagaaaaaaagcataattatgacagaagtttgtgaaagccaagaaattcatatttaaagactgatattaacacagtgttttaaaatagcaatgcaaatttatccatttccttaccacttccatactttatttttgtttccctatattttctttcttaggcactgtgagtgcacagtgaaaaaagtgtaatgctatctgtataaaatatttgtgtgtgtctatggtctgcttttctccatattttcttcatgcacatataatgcttcaaattgtcttactgaatctgtagtatgtatgtattttctctattataaaactaacaaagacttatttataataataagctttcttttagttcatgctatccatccatcattcaaatgtacttctcctgtatatttaaaaaatagttccctgataaatttatcaaaattaatagcttaccaaaaaagggaaactagttatactgtagtattgcttcagctatacttgggctagaatccaagttccagtgtcttcttcgatgctgctatttactgagcacgggagacaagaagattcctcaggatttgcgcagtttaattcagtaaagaaatctggggtttttggacaacttgacttatagaaaatatatgtatttttaaagcataccaacttacccaagctagggaagactcttgggatctaaatattgggaatctaaatatttgtctatttctgggatagacatatatcacaatataaatatttatccttttctttttttaagtcaaaggcattttattcaatagttattaagcacaattttttgttacacattcctgtaaggattatatgcgcctatatatcaaggtagagtgagtgattggtgtacaataaagaaatcatattttaaacatttactattaatgtggtattattaatctccttttgcagttcttcatgaccacatatgtggtgatttgtcttttaataccaatatggcaagatttatttttacaaattaatgatttggggtgacttcctgcaggagggaatcatcactctcaaagcagaagagaagctaaggggttaatatgatttaaaaatgcaaatatttgaagctgttttaaaagcatgaaaaattattattgcacatgactttttgctcaaattgacccagggtaaaggagaataaaaagtcaaatggaaacccacatgttcctgtatttaaaaatgtatacacatggaagtcatgtggggagtgaaatgcacttcatcaaaactggcatttttttcaatatacctacatcatttcccaaaatattgcaaaatagaaatgtgtcagaaaggacgcttgctatttgcaaaaggagaagcatgcaaaaaatattgcatgaaactcctatttcaacggatccatttaattaaatccatacactattctataatctatgaatgggtaaatatccagaacaaggatcctctcagttatgagggaaaactttcacaaacttttggaaggaacatatgtcactgttttaagtgttgattggctcattttattctgattcctaagatgaaggcaggttttagtcttaagccttacccaagaaattgctccaattttcaggtagcctagttgatttctttgctctagtttgaatatttacttctcccattaattatatcctgtactcctagtaattttctaacaagccaactggaatctgcaggccatcagaaaagtgttaaaaattatgcctcgtgttctaaaaggaattaatgtctacagctgcctgcttacaaaaaaagagctggtcacattggagattgctgatggcatcgaggtggttgcagtagcctagaatggtggctacacgtcttgtcatctgtagagtatcaatatgtttttataatgatacaataacctgaaccctgtaacggtttatggtccttttgagaattcttatggattcttagagtgacagaggtctgagaaaagatcttgaaagctttcacaaaatctggctgggtgacagaaaactagcaggactgtgatttagccgctaagaaatcctgttgaccaggaacatcattaaacttttaagttaaaacaagaaccacaaaacaaatggtagatgcaaagggtaaggggtacccaaagtggcagcaaaaattaaaacgtgccgaagattcttagataaaaggcaaaatgcagcaagcccattgttgatcttgatctcctacttagaaataagcattttttaatataccattctgaatattgcaatgtgtgttggaaatctgtattcatgcatttcctttatggaatctgtcagaactgattgttgctctttcattttctctggctatttttagtcaatgataaataaagaacttgaattttgaatctggcaccagtgagatatagaaccagaaacagcaggaaataaccacgatgagtaacttcacatcagtatctgcacggagagctcagtcctcttaacatttgtaatactgctaatttctatgggctttttaaaatacttccacatgagctctcaaaacccataaaagtgtggcatgtaaagtaaattgtttgtcacttgccgacgacctgccatatttattgtcaggagaaatggacattagttggaaaagcagttgttaaaggccaaacaatttttaaagatggcaaagatgcacgagggttttcctttttctaacaatgagccaccccttcagacatcaaaagacaagataataagacacttcaagcacaattcaagattatattcaacatctaaaggctcatctcttgtcagtttgcatttactctcccagggatgtgatgcttctatcatctttctgtcaagaggagtctggcagaagaagcgagggctcttatttcacacacttagggttttttatcaaatggcccacactcgttctgattcagccaaaatgggggcataatttgaagaaggtcatgcacaagtacaaaaatctcatattgatttgtgtgattagaaggcattaaaattgcacatttacgttagttgctgagatgttttgtcagtttatttggtaatacacttttgcagcctagaaaaaaaaaatgacttaaaatttaaaaatagatggctgaaagccgaaatggtttgttttaatgtggctatgtttgaacgtttagcaagtgaacataaaaataatgtaaagcttttagtttaacaatatttgaaattagcttatataatgaaatacttcatgcaacataaaagcaaaattgcacaactgtgcatatcaggtgaaacaaatatatatgtggaattattttttaaatactttaaaaattgatttcatatctttaatatatagataaaaagtgatgacattttcaatataaatttaattatgaagctgttttacaatggttatcaagtttttaacattttgcactctttgaaattacagtgtcattatatttgtcattttatgccattcttagtatatatgcccttttccagagagggtactaaagaataaataaaagggttattattattattattattctctgtcaaaattcatcacatttccttctttgctctctgacagtcacaaagccatacaaagaaacattctattttggtaggggcatgtttatagaagttagaagaacaatcttttcctctcaaaataaaacaattgatgaaaataaaaccatgatatcctgggatcatttctatattgaatctttgaaattacttttcctaggaattttcatcaactctctgttgtctccacttcttatgtttttctcctttgctgtgaagtgttttgaaactggatttctcacttttgtgccactttcaaaacaaaggagaggtacatatatactgtgtagttacagtgtagaatagaagtgaaaacccataatttgccctatttattaaatgagttttttctattcaatacagtttatgtattcaacatggaacagtgaattgatccattcaataaatgtttgttgagcacctgctctgtggtaggggctgtgctgtgtcctgaggactcagtagagaagacaccacatagaattgatcacctagctcacccactgaaaggtatactgaagatgcaaaactgaacaagacatggggaccccaccctgaaatagcccacaatcagcatcatacattgacattctattttacttgatcatttctggtagctttttaggcaattttaagccttcgaaaccatacttttcaagagttgtttgttggttagaaacctcatttgagaaaaaaactattatctccaaaaagtagggaagaagaaaggagtattaagcggtttgtgacaaatgacattagcaatgttttcgtcacagggtttggtgcatatgccgtggaacacaattgctcttctttagggattgtctcttaatcatgtccaaaaggaggatgaattagattatttcttcctgcctgtcttttctgcctttattctcctcccaaaattcttgtttgtcttatatattttttatttttttatttttatttacttacgtttttacatgtgttctctcagaagccaatacattttatttatttattcattcatttatttattttatttttattatttttctgagacaaggtcttgctctatcacccaggctggagtacggtggtatgatcatggctgcagcctcaatctcctgggctcaagcgatcctcccacctcagcctcctgagtagctggtactacaggcgtgtaccatcacactcagctaatttttttttttttaatttgcaagagagggggggtctcactttgttgcttaggctggtcttgaactcctggcctcaagctatcctgctaccttggtctctcaaactgttgggattacaggcatgagccactgcacctggccattgtcttatactataaagtagtgcttcaaggctctggagtcaggttgtgtgggcttgagtccggctctaccactttttcactggctgggtaaggtaataacatgttgaagcttcagcttccccatctctgcatggaggtattgctggtacgccacagggcaatcttgagcttgaagtgaaatgacacatgtaaaagcctatagagtacctggaatgtaaccagagctcaatgaatatcacacgttgttaagagttgaaaatgtacttgctatgtttagaaagaatctgattaattttgggcagcagataccataaaaccaacaaaaattgtggcctttggaagtaaccatgcttctccataaggaaacatgagcccccaagggtcctcctgatcaaagaaaggttctggggatctttgcttcctaatggcaacaccccttcttcagtctttgctttctcttcaagttcattcaggaaagaattcagactcataaatggaggttctacaggggacaatagttcactctcttcatcttatggagagtacataagtgaggtggtgagcaaggatggaacagggcagttacacatctcactcttctctaaatttaaaatgttggaaggtgtgattctttcaaataatagcgattttaaaaataatgttggccttgagaagtgttatgaagccagatgtctgtgggcggcagcaaatgcctttctccctggtggtgtggtcagataccctgggggcagcctgcctttgggtggagttcctcccaggggcatccgctgtccctccctccctccaagggaatttgccagctccaggccaagcacttctatctctctgccttgaccacactgttgcccatgttgggaacagagcatttgtctctagttaaatgtccagagatctttcataggatgcttttgtgacctaatcagggtaaactacagaaaatttcagagagagagaaacattccattgaagtgttatgacgattttagaaaaatggtgctgcagaacgatggtaacctgggtttgaatcaccacccttgacctaggcacaaggctatgagcttatgtctccgtttcctcttctgaaacatgagtgttaaaatacctatctgatgggatgttgaagattatgtaaaggaaggcaaataagatgcctgcacatggtggtgtttaataatgaaagccccttcccctcacttcttagcccaatgcgtatttttccaaggtctgagaagtgacttattctgatgggggttctcttgggagcgtggatcagagattaatgatcagcaggggctctgaacgttaagatctcttttctcaacgtagctttctccatgaaagccaaaactcaagctagatgtagagagcataagctttgctctggaagcaagggatttgactagattgtgggtcttctctgtcccagcagagagctcttttctgcccctaaatggaagtgcttctctcaaaaagttagttatgtgttaggcatgggaacatgccttcaactagaaattcatggagtcctcattccttaaggaattttcatagccaatgtttaattggaattttcagatcttcaacaatgaacccttttcatatatttttcaaaaggaacaaaccaaaaataagatggcaacctcaaaaaaatctatcagtgccacacttccaagggtttgaacatgctgtgaatatttaagtagcttaaattgacatttggagccatcattgggaagaaacatgttataacctttgttgggaatatttacacattttggttgagatccgtaaaacctagttcctcttatatacaccaaagtcatcaggatcagtaaaagaacatctttctgttgttgttgttgttgccatggcaaccccacacatttttaattacatattcatgccctatgctcatttcttagaaatcattggcacttctaaaaccactcatttaacatgtgtcgatcaatgtcaataaatatattgtgatattgaaaaatattaaatcatggtttcagattgaattaatgtacatgtttgtgttaatgttaagtagaagagacaaactctcttttaagccagtggcaatgaccatccccttcatataatgtgacagttttgactttcctcactgaatttatagctgtatcgccccttagatgtcccagatgttactactgttccctctgtggttttgtcattgggtaaccaaacttaaatctgtctccacttggctgcacccctgagcagtgtcagcgtggaaagaatgatgttgggaaaacaaatacaaggttgggctacctcgtacacaggaatgaaaatccacatcttcattctatggcatgaattgggtctagccttctttactgagcctgtcacccagctctgacccgcctttccacaccattcatttccaaccaccatctagatcttccaatttttcatatttttataaaagttaagtgtattctttttttttttttttttgagacagagttttgctcctgtcacccaggctggagtgcaatggcgcaaccttggttcactgcagcctccaactcctgggttcaagcaattctcctgcctcagcctcctgagtagctgggattacagccacccgccaccaaacccagctaatttttgtatttttggtagagacggggtttcgccatgttggccaggctggtctcaaactcctgacctcaggtgatccgtccgcctcagccttcccaaagtgctgggatcataagcgtgagccgccatgccaggctgtgtattcttttcataatcagtcctgactaaaagtcagcacttaagagaagaattgctttttctaggcaagattttttttttttttttggtacagatttctcttatatgttccatggtggttcaaacatcttccttccttggggtccttgaaatttttacggtctttgacatccctgagaatttgcaggttgtgggattagggtggggaaaggggagatgtcggtcaaagggtagaaagtttcagttaggaggaatatgtttcagggactatagttaataatagcatggtaactatagttaataatcatgtgttgtatatttcaaaattctcaaaagagtatattttaaatgtttgcaccacaaagaaataagtatgtggtatgatggatgtgttcatttgcttgatttaatcattccacaatgtatacatataacaaaacatcacagtgtattccataaatatatatggttattattagtcaattaaaaaatttaaaacaaaattgtagcttacctttttaattaaaaatattaaaataggcttcctcactctaagactttctttacaacaatttgctcatgaaaatggcaatacttttacactatcttttggaaggacaccttattttttggtcttctgatcctccagagatgtatttcttttttcctaacagctatcagcctttatgaaaaaatccacagaatcatcagagcagtacattgttagctaataacacttcagtttcaattaggtgaaagggccaggtgcaaataaccatttaatatcttgacgtgctgtctaagtcgcttataatgaatttattgagaggttaatttattcaaaaattaacacctattaagtgtgtccccagttgctcttccccctttcttgtggtcaaaatattctggctaagctttttgatttccaacattacaatgactcttgccttctgctgctttccaactactttctcattttttacagcctcttttgcagccatttccactgtttgcctagtattatcatgactcgtgcatttgtctgcctccttgctgggtagctagcccctagaggacagacaatagatcttgcatatattaagtgccagataaatgtttttttaattgaactgcttctgaattcgatgtttctggacatcatccacacttagccaatatttactgaatattaagggaaaatagactctacccacaggagtctactatcctatctagggacagaggtaaatatatatatatatgtttatatatgtatgcatgtgcatatatatacacacacacatacatacagtgatgtgtcacttaatgacaagaatacattctgagaaatgtgttgttaggcaatttcatcattgtgtgaatgtcatagagtgtacttacgtaaatctagatggtggagcctactacacacttaggtttgtatggtacagcctgttgctcctaggctacaaacctgtatagcatgttactgtacaaatactgtagccaattgtaacatgttggtatttgtgtgtttaagcatagaaaacgtacaatacaaaataagatataatcttatgggaccaccatgatatgtgcagtctgttgttgaccaaaactttgttctgtggtgtaaactgtatatatcaacaaataataacaaaacaaagataaagtgccttttcacatatccaacaaatatttattgagcaccttggtgctaagtattggactaggtgctgagactatggtgagaagttagacagaattggtccctcctctcgtggacttcataggaaactcaaatcttaagcaatgattatccagaaatttaataatttgtcattgtgagaagtgttctaaaagagaagtgacagaagctagagggatgaataatgagagctcatgactttgttggtagcatcgcctgttgtagtggacactgggtggacaatatgtagatgtgactttggcaaatgactcctctcccattggagggagatggagtcttggtgggacgatcaatcaagacactccatcttcccctagacaaagagatgttacatggcccaaagtaggcaataaagtgctttttcctgggaagctaattcttgaactgagtgatccaaagactgaaaagccatgaggctgtgtctagctggtgttcccctagaaaatgtccactggtttctaccaccttgactcctggaagagtcttggttactatctcttcagagaaaactagatctttagctttttccttgaattctgtgatccatcctaaacccttaccacaaattcttttctctctgtttctagtttttgctttagtaagccagggtagttttgtgttacttggagctggagaacccctgtactggcaaacccctgtactggcgaacccctgtactggtatgttcatgacctccaggcttcacttagataagacatttttctaaaactgatatttcaaggctagaacagagaaggcatcccaggtagggcaaacatcatggacaaatatacagagtgaaaagagttatgtccagctataattacctaaagggaagtaaagaattagggcttccttatgggaaaaggggtaggaccaggaagagtgttaatgacaaatactgagatctaccttctgaatgagcaaaactgggaaagctagagcaaaactagataggctcgaaattctggagctgccgctcattccccctgcttagcctgagacacggtgggagcacctaccaccagctctatgctcctctgctaatgtgttatttgaagtacagctgattcttaaagtgcaggtgctctagttacaattatagggttgctcccattatttattgctgcactaaaacccactccagaacacagaggtttacatgatgacaacattcattttgcttacaaatcttcaattttggcaagcctggtagagatagtgcatttctgtctgacttagtgttagctgtggcaggttttgggtggagggctagaatcatttgaagtcttgttctcacacgagtcttgtgattgatctgcccggtggctggaaccttagctgggcttggtggccagagtagctgtatgtgtttcctcacaatgtacctgggattcttcacaatatggtggctgggttcccagggcaagcatggagagacaggggagggggaagggaagaggcactacattgactctggctttcataaactagacttttctaacctagccttggaagtcaacagcatcatttccaccactgtctacttattagagagtcaagtcattaaggctgttccatatttgagaagaggggaattaaactctacttttgataagtgtcaacaaattaatggacaggttttataatcaccacaaaagtaatattacttctacatatttatttcttttctgtctcataaacttaaaagaaagcactttggagaccgtgtcttcttattagtgaagagatatttgaatggataagatcttgtttgaagcagagttaaatgggagataatgtctgcaacatttagtgagcatagctcaatgtcttatagatatgtgcatgtttagttctcctgaaggttaccttttttatcacttttattttcctcacagacattaagaggtttagtttaaattttggaatctgggtttttactcaataagcatataaaacatgaagtctatcttagggcatcaagagcagagggcagatggaatctagaagtccaccatgtcacacttatgatagacctttggttatagcagatgaaaatagatttcccaaacctaacatattaagctcaatacatttctctttggtaataacagacagaaatttctgttataataaaccatttccaactctttatgtctaccactagacattctaaaaaaggataggctgagaaaaacaagttggtgtgtttgaagatatttcatgtaattgttatttataagaagatcatctaagtcataattttctataaatatttttaaattaaataagttctatgttttagaattttttttaacctcaggttttttttttttcctggttttatctaagagactcgctcttcaagtgtcttgaattcttgtagaagttgatgccacatttccccatgtgtgataatatctatcaagaagtctcagcacaggcaagaataagtattcttggtgctttagatagaaggatatacaaataatttctggctctgttgattaaagtggggggtggtgcaaaagatcccattaagactcagaattatctgtagttattctaagtatggacgtggtaaactaaaatgtgcttaattgctatgtgtttttcaaatagtggccagacgaagaagtttttattaacagaaaaagtcatgaacttagtactgaattcttttcactattctaagaattctagcctggaatcttgttttcctgaatcaatatcctccagccctccagtacccaggggatacatggaaagccaagatggaacctagttggatgccagccttcacacacagtacagccagggatgttcccaagtggggaggtgggtagggtaccagaacatgttaagctcagtgcttgtaaccactctctgtagatcatggtgtgtggtgcaaagatgcaatatgaaatgccagtctgcagaacttttcacaaaagctcttccttaaatcccaattgtaagaatttcataataaaatagatatccaagtgcatctacacactcggctttactgtttccagatgtttatagtgatgatgataatgattgcatagactagcatttttgaagttttgtcatttacagaaactccatgaggcagatatttaccaggatctggctattagacctaatacagagttgataccattatgaccattgttgctctctactacttggagacttatggtggtttcctgttgaactcagaataaatttcaaacacccacaacatcccctccatgttccagatgatgtgtaataatctacaacctaatgctataactgtgctgtaataatctatagtcatgcagtaataaaatgggtttgtagtttgcttttttcatgtttagtttgtttttattgaaactatagtattggacattttttctatgcagacatattttgtagcaatagcttaaatgatgtgaagtattttgctcatatgggcatgctatcatttattaaattaaactcctattattggacagttagattgtttccaatgtttaaaattgaacatttttgtagataaaactattttttcatctttaatcattttcttagaataaattaatagaagtagaattactaaatcagtaggtgttcacattttaaggcccttcagaaaggatatgcaaatttatacaactatgaacagtgtttcaagcctgaacagtatttgagactgtccgttttttgattcctcaccaaatctgatttttatcagtatttttggtgttggaaaatttggtacaggagaaatagtatttcttttactttgcctgtctttgattactaattaggcttgaatgctctttttgtgatttttgaccattggtaattcttctgtgaattgcctatttttcacttcttttgctgggaaatccaccttttttctttttctttctttctttttttttttttttcttttttttcaaacaaggcctactctgttgcccaggctggagtgtagtgttgtgatcacagctcactgcagccttgaccttctgggcccaagtaattctcacaccttagcttcccaagtagctgggaccacaggcatgtgccactgtgcttggctaattttttaaatttttgtagagacagaatcgccctgcattgtccaggctggtctccaattcctgggctcaaatgatcctcccacctaagcctcccaaagtattggaattacaagcattagccactgtgcccaccttcttattgtttcatatgagctcttcatattaaaaaagacaccagtattattttttcccatgttttttcaacttttgtagactgttagataagagcaaataaaacatattaacaaaagtatgatgagaaaaatattttcttttgaattggctagttatctaaagaccaacaatttgtttatacgtggcagaatattatagtatttttgtagtcaggattctggcaggaaagagatggcatacttaaactgggtaaatggaggaaagtttaataatggtactatttacaaaattttcagtagaatgtagggtaacacaagggatagtggaaccaccccccgccccctacaacacacaagcataagtaatgcagtgtccttattgcccttgggcccttgtcctctctctttacctgaaagggaccagggagaagcagacacccaaacccagaaggagagagtcagatgaaaaagttcacctctattgtgggatgcagccatccccaagaagactccaccagaaaagagacaaaggaataaatgttccaattttattctctctccccttcctttgacaaaacccaagtggaaacagcagagcaagaaaagcctttgatagagtccatagagatcagcctcccagaacacagagcaacgtggaaagggtagagtgtaaatctgtagcaacagatggtttcaacacaatgggctataactgtgattctgaaattgctctcaattctccagcctggacattaaactgttatttaacatgggatcctcatctgtaagatgagggcgaccatagtaaccgcctcatctggttatgctgataatcaaaagagtgaagggacttgcatagtcttggcatggagtgtctagatgcagttgttgggaggagggagtgtaaggaagttgaaatgtttcccttcaattatttttttttttgctctttccctttttttctctcctttgatgatcccaatttctatcctagcctgggtgctggttgagatttaactaggtaccagcagtgtaaattaccaggggtcaaccctctttctttccttcgacctcagctggactgctcatggcaatggctcccacacagcatccagacagacctgtgtctctccctaggggtctacacctctgatcagtggcccaggggaggctctggggtaccctgtgccacatccccagaaacttgatcatgttcccccagcctaggctggttgtgtacacccagggaatatttcctagagatatcttcatttgcccagagaaattatgagatacagtgaatgcattccccaagaggaagtttttttttgttactacactaaccatatgagatgagtctttagtatctatctacagattctagttttaatgttctctttctagataaaacaatcattaaccaatgaaataaatatgtggagaagtttgtgtatggagtatgcaataacaaacagatttatatgcactcttgagatgtttttaggttataatttgcaacacaaagtatatatttttatgaaacattagtagaagaatttcccaatcaaaactagaggaaaaaggttaagtatacaattgtaagcaaacaacaataacaacaacaaaaacttattgggagtctttagttgtctgtaaattgggtgccccaattttgctgttaattattagtttttggttttgcttttgtgtttactttttgaaacagggtctcactctgtcacacaggttggagtgcagtggtgtgatcatgactcactgcagcctcaaactgctgggctcaagtaatcctcctgtctcagcctcctgagtagctgggactacagacatgtgctgccactgcatctggctaattttttgtagagactttgctatgttgcccgggctggtcttgaactcctgggctcaagcaaacttccaacctcagcctcccgaagtgctgggattataggtgtgagtcaccacactcaaccagttattaattttgaatgaagtaagaataattccatatacgattattaccattttaatactcatatgaaagcaccacagttgtatgtgctgggtattaatccaagacactgatgtctcacctgagttggtctttggaaaggaataaattctgcctgatgagtggtagcataatgtgaccctgcatccaatgaggcatccttccatttgcttgatggagattttagcttattctcttaagttagtcctggtgtatgagcttataatatttttataggattggtaaaaagtattgtttagtttgatagtataatttatactgtaatttattggtggaataaatattagagctgtatgtctggtatactcattacacagtggaaaatgtaaatcgtataggtagcattactgatgaagttatattggctttaaatttagagtgatatttctgatttgaatcaatgattccagagctcagagaggcgtctggtagatcgaagtagctcttgaaaaattatgtatctctctaattctaccatgagtggtgtcctggagccagctcatgctggcttgtgagagataattgctatatttttaggaattttgtgagctaattgttaaatatagctgctattaagaattaaattatataattggctgggcgcggaggctcacgcctgtaatcccagcactttgggaggccgaggagggcggatcacctgaggtcaggagtttgagaccatcctggccaacacggcgaaaccccgtctctactaaaaatacaaaaattagctgggtttggtggcgggcggctgtaatcccagctactcaggaggctgaggcaggagaatcacttgaacctgggaggtggaggttgcagtgagctgagatcgcatcactgcactccaggctgggacagagcgaaactccgtctcaaaaaaaaaaaaaaaaaatgaattaaattatataatcttataattatatgaattatattaaaaacaaagctaaaaatatgaaaactgatcatgttctaagtattttactttattttattggtttctatcctcttgaggttactcacatttattgcatctgcatggtaggaatactacataatgatgtgctattatatgtcttttcccattcctacattaaattatgtcacgttggtagcttgaaattggccagggagagagtatttacactatggaaataggcaaatgccttatttattgtttggttgattgtctaaacttgagaaaagtgacagaggaaatactaataatatagatgaaagttaaaagtgtgttgtctctataggtattatactattaatagcacaaagaaattagaaaatacttttacagtaatcaaaagatgttatataattcttcaaggaaatcacttacatcattgataaatgagtgaagctctaatatatatctttgttatttcacttttatcttgttgacataaatgaaaatagcaatcaacattcacacagaatgtttgtcaatggagtgaatgacttcttgctaaatcagatagcaatccaacatttatttgaagtctgattttataacactatcattggtgatagaattataaaaactgatagtggattttgtaagaaatagtatgtcacagaattatatgtgtaaaaaattttaaataaattgtatattttgttatttttgtaaattgtgttatacattctgtgtatcaatttttgataaatgtgtatatgtgtatatatgtatacttttgtccccaggaggctagctgttaaacaattaccactacacaattggttggatattattaattctaaaaacaattctgggaatgtctgctactttggttccaacatatcagttttaggtttgtgaggccccacaaggagatgaagttttactaataattttttgacctcagaaacatcatgaaggcatttaggcaggattatcatggtagcatcttagctccaacaccaatttcttttttttcttgagagaaattgtttatgaattattcttagtatttagatttctgtggatggtaaaacgaaagtgaagagttttacctttactcagattaagaaaaatatgaccttttagttatatgaccaaaatatgaccaaccattttgggttttgttctttttgctgttgttgttaatggttctctgcataattcattcaacaaatattaaaataatgaattttcatattttatagctgcatcataattgtagatacttaaatacattagatataggtacagataaaaaatagatatagagatataggcagacagacaaaatgacattgcatggtcttcagagtgaagagcgttcagtttggacagtggagaactatagtacattcagatgacccttggaagataaagggttttacaattatatcacgcaaggactgaacaatgaaacagtcaacctgcagaaatgaacacttagaaagccattggaggtatttccaatatctgcaaatattggcagattttttttttaatgttggagaaagactggacttattctgggtggtttcagagggcttaccaaaccccaatgggtggaagctttagggaattgaatttgtcatgatgcaagaagaattataaaatagctaaaatcgttcaaaattaaatgtggcctgttgagaaggtggtgatttcttcatcgttagaagtccttaggcagggatgatagttgctatagatgggattcagatgacctctgttcttacccttccagttctatagttctgtaagtacctgacttctcacctgtgtattaaacccaaagcagtagccagcccttgtcaacgtgtctgcacagttgaaaactggctgaacatgttggttcagaaatttaaggactgaaattagtcttttaaatatgatacaggtaacttaaaagtactacttttaagtgagcgaattcaggtaaaatctcattggaacaaatacccttacaaagaagtgctcgctataacaaaatgtttctgtatactggaaatagcacatagcacaaaactttatgatctattaacagtacgtaatatattattgcatgcttatactattggtactattgcttgatcacagataccctgttgtccattcttttttcaatatgcttataaccaaaaataaaggcagggcagagaagtaacattcaaaactgctgtttaaactgagttgccactggcaagctatttcagttaatatccacatgaaattgcttacagcataagaattgagtgttttttttttcttctactttttaaaatacatcatcccctctaggggccaattatagccccccaatcagtgttttacttgagaaagttcatagatcaaatgaataaaaatgaaacttgactggcactctggaatattaattaggcttggctacgtagctatataataactgtgtgctgaaaggatttgtgttgattagcaatgctaatcagatttctaaagtttctgttccccagagaaaagatactgccatcttaagctattatggattagatgtttatattttaaccccctaattaactattcttgatttttataagacagctgaaaattttgaattttaattgcatttttacaaaaaaaaaattatttccagagaccagaaaactcacacgaatatcttgattttatccttgagtcagcttagaatataaattccaaagaaacacagtatataaaaagaaacatgagaaaaacttttgaagtatatcattgtcttgaatttaaattccaaaactatgctcaaggaagggcctcttggtacccactttatgagaatgtatcaccattgcctgcaaaagtccaggagaaagtgctctgtttttttcgttctgttttattttattttttaagcaacaggaaaagaaaagagaaatactctaagttaaatgaatggataaaatttgctagaaccttaaaacaacactgtcagacaatctcatcctggggtccgggttactggctcagaggttcatggctacagtaatgggactactacttggagcagctcaccaagggaaaaacaaacttcatgttttctccccaaatcaaaattaaaagacagaagaatatgcaaggaaatgacataatcaaggaattagaacattctccctcaagttacatagacgaaacaggagctaaaacaaacagagataaaatcagggcttctaaagatctggccagcaacctagtcaactcgaaacaatctggaaatttgaagaagtcgttgtgatattattacatctctcttcttaggtttgtttctttttattgcaaattggctgtttagggactgggcctcagaaatagtttatctttagtttctgcaaaccaggaaaatgcctcatttccacaaaatctaccctggaccaaaataatttgtgaacacatggagttgcttataatggagattcacgagagcacatttgcttccaacatggtgcattgctcttggtcacaagggctgatgggaggtgagtaagggtggagaaaagagcaaaaagacatggccattatttgggggaaaattcaaggaatacccttctggctaggtccatagcatacttttttaatatttagaagtcagcagagtgtatctcttaagaaatggtttaactgaacgctaatttggggcccagcaggatcctaggctatacggtttataaaaacaaacaaaccaaccatgaatccatgcatgtacctataggtaaacatcctgaatattgacatggaattgctagtactgagattacacacatacaaataaacattacaaaggaagataatgagtgaatccaaatttctttgtcatttttatcattgttaacagccatgtgatggttatggtagtcatgatcatcacttttcaactgatagtaaaaatcttatccatctcacggtaatttaaataagagggaagctcattcatctcttctgcagggttagagtgagtatttgactgtgggaatttagcatttacccttcatgggtcaatgcataggtgagtcttaaaacccctttaagtgaagattattttaataggaacttcctccagcccgctgcttttcaaaggcccaaagcaatattccatatttcttagaagaaaataaggtcacatgtggggaaagtactgataaacaatatcattcacatggaaatcaccacttgaagttaataaaaaggtgatttttttttctgggtaaaaaagagatgaaactgatttttgatggtattaaagaccagcaattttattttaaaaattgccattggtcaggtgccaaattacagtttttataccataaaaatgaagttgttaaaccttgcatgaaaagaagagtatcatcttttaatgtttaataatattttttgtattgtgagcgctttgctgctaattggagaaatcatcacatgtatctcagctgaaggagatttttaaattttataaaagatgcataatattagttactcacatacatatgtgagtacacatgcagacagataggtgagcacatagacatgtgtgtgtttgcattatataggcctatattcctttgatttacataggtataaatcatagtggtttagggagctaaaatgcctattactagttaaaatatatataattagcaatttatattctcagttgtgtaaagacaaaagtgatctccccaatgtcaggtgcgtgtggaaagcaaacctttgagggttttggctttgcctttcattcagcagatgagaaataggagatccagatggatgcccatgatcatacagccagagaagagagccaggcccagccagggtcttctgtcctcatctctcttccagtgattgtgtggagagatgtcagagatgggacatgtaaccatatcttttttcttaacaaacttccattttttttcactctcccattaaatctcagctttctttaaaaccttcaaaacttatttatttatttattttaggtaccttctatttccattgcttcctactccttctctgctacttcttttctggtactttgggctccaaacaaggttgacttctctcaggagtcccttcttgctgtcctgccactgttccctgggcccagtagagcctgctggtctccttcacatgaagttccttatggctttaaagccagcccaggtcttgcctactacataaagacttctaggattacatggaaatcttagaagtgagaacagaaactgtatttactgacatattactgagagcaaagtcaaagaaacccctaacttgggccagtgtgttggttttggggaaagatgagaattgatcaagtcaaagcttccggagctcagtatcaggcctggtatgtttgttttttggatgccgccatttgaaacaggtagaagaagtagagcatttggcaaaaattaagtgaaataaaatcttttttttttaaagacatgctctgtttgtatagtatacttatgtagctctggcaacagcttctctttcctggattacagaaatatttctttgattatagactgaattcaaatttgagtactttactctcatttgcagattataaagtaagagattgttcagaggttaagtaactcattcactgtcctacagaggatttgggcaaaacctactcagcagactcgcctctccatctggacattatctttttattctcctgcactcagggcaagctccagttaaaattatgaagcgagccgggatggtggctcacatctgtaattccagcactttgggaggccaagatggaaggatcgcttgagcccaggagttcaagaccaccctaggcaacatagtgagactctgtctctataaaaaatttaaaaattatctgggcatggtggcatgcacctgtagtcccaactgctcaggagactgaggtgggaggatctcttgagcctaggaggtcgaggctgcagtaagccgtgatcatgccactgtactccagcctgagtgacagagtgagactgtgtctcaaagaaaaaaaatcatgaagcaagttatcattatcactcatataattaactagtgtttattgaatgtttacaaggtgccaggtactttgctaagcatttttcatatgtaacctcatttaatccctttgaaataaatattatcattcctgttttgtagataagaaaataaatagggaggctaactgtttaatattatgcagccaataaatggaagtgagttttgaactcaggtctctctggcccccaaaggctttctcttaaccactaaactatttatctgtgtaaccagatggcttgggtgtttgatgtcttctaatctaccaaccttcttcctcttctctatgacatttttgtctcccctccctccagtgttagatatcctgatgacctccctccttccaaataaaaatcttcagatttttttttatttacaccaagatttttgtctttacacttcccaagagtaaaattgcacatcacttttaagcaaaagaaattttaaaactaaatacagaattttaatcaataagtcagacaggcactaggaagttcaggggtatattaggagcctatcgtgatttctctgaaatgacattatgtagtggcaccttcttgtttgtatggtgagtctgagagagctccttttttgaggtgaattatagccagagggaccacctatgcagttgcatttcaatctcatacattttgaaagataggtatgtttcaaatgaattcagcaatgcatacccagaaaattacttaatagcaaatgaattattgcttcacttgttacatagtaaaatcattatgataataaatctttagtgtggttgctgaaagcttcagcttggggtgtcgagcaagggaagagtaaacaaccatgcctcacaaggcagtacaaacttgagttacaaaattatacttcctagggaaaccaaaccagctcccatattgatactactaggggctagacaaaacaaattaaaaccaaaaatgttagagtggactcagagttaaacatgggtgattgaaaacatgcatttttcttcactgtcttctgaaacccaataaacataaccataaagggatctaaaaagacataaacctacgaggacaaagaggagcaggaaagagatgaccctgaacaagacagttcagcaaacttttggaagaaggaaaatggatgagtaataactgacttggctgagtagagaaaggtgagcccttactgcaggcaggaggagaagccgacaagagggaaccagtcctcacagcagagccactggtcccctcaggaactgaggcacctagtacctctgcacaggaagtgttcaggtacagctgaaagtaagaggactggttgaaaacctataaaaagcagtcagagcatgaagatctctcctgcttctctcttagaaggtgagcaactctcccccacctatcggagacatgagccttactgtctggggagattgaaacagagaggttccagtctcagggacacccagcccagcataggaaacccaaagggccaaaaacaaaggcactgagtgagaactggaccctcacttggagggttggagttgttgaactccaatggagttcaccaatggagaagttgaaccctcagtttccttcccctgctcaccttgtagaatgctgatagccatccttagactcttataataccgcctttcccatgtctccaattagcagaaaattacagggttcttctctggagaaatgagctggtccactagaaaaggcctccagattttgacattgagtgttctccagcaaaatgactccttctcagcctaatagatcctaagtcaataaatctcacctatgcatacagagcatccaatcagctttttagtgtccttcttttaaataacaactgatagccaaagattaccaggtatttgatgaaagccttcaatatgaaagatagataataaagaaacaggaatggaaggaggagctctggaaaaatagaagcaatgtatacagcaacataaaacttggagaaaaaaaaatcccctcaacaacataagatactacaattgtgcagcaggaaaaggatgccacagagaagagacaaagaccaagaaagagctcttggaaattaaaaaatatgatgactgaaattaaaaaatcaacagaaggtttagaagagatagttgaaatctaccagttgttttcaggctgtacacagagatcaaacaggatagaaaaaattaatgagaaagttagaggtagaaccagaaaattcattctctggttaacaggagtaacagaagaagaacagacaaatgagaaagggaggaattatcaaataaataatacaaaaataatttctcataaacaaaggatatgaactgccagatcaaaagggctaggtaacccacacacaacgaacataaaaagatcacaccaaagtaaatgaccatgacattttagaagattctaatcattttcagaaacaacaaaagggcgtatatcaggaactagagtgacatcagttttctcaataataactcaacaagttagaaaatgatcaagccatgtgtccagccaatctatgcagcaagtcatagttttcattcactcatgttcaactttaaacaactgcatctcctatgtactgcttcttgggaagctcctggaggatttgctccagcaaaatgagaggataaaccaagaaagaaggcctgagagccatacaatgagacgggacccaggaaagaggtggagggaattcccagccacacaggggaggcaaggtctggacagcaaccaatcctgttaggaatagaaccctgggatgcccctgggaaaagggcacaattagatgcctgacatgttcaacaacgttgagggcaattggcaaagagtttgaaagaagaaataatgatttacagatagaaaattactaaatagacaattattaattaccaacaaactgtcagaaataattaaatatcactgtacactgtgtcttaattgtaaaaaataaatacataatggtaatataaacatcacaaattgatttattcaaagatggtgatataatttgctttgggagagagtcaaatggaaggatggttggaagaggggaggggaaacggggtggagagaattcagttctcaccctccaaaagagaaagctataaatagtggctaaaatagataatcaaggaatagcatggcaagcctgttatttagaaatacaggcatggaggggaactaaagagtgaggaaggattgggcaagataaacagttttctctttaagcattttactgtttgattttaaaaatgtgttgtattacttttgtaaatattaaaaatgaattttaaaaaccagacctaaagaataggtattctcatttatgacccaaaataaattaatagttggtttggttccttttgctataatttctccaggtcaataagaatatatgtcatacctggttcaaacatgagacaatgcgttaaaacaaagggcttgcaattcacagaattagaaggcacatacgatgaattgatgttcttggggttggggaacacaaggctctcatttgatgctgtttgaaatgaaataaaataaaatccaagccaagtcaaagtgccacaggtaggaagtgattataaaccagcacttgtctgtaagagtttcacaaatatcacatcacttaatgaccagaagcctgttaattgtctgggtaccagagtattgtatcagataaattcagttctatattatacttcatatatctgatttaaaaacattttttaatagaggtagggtctcgctatgctgctcaggctggtctcaaactcctgggctcaagcagtcctcttgctttggcctctgaaagtgctgggattataggtgtgagccaccatgtccagcctgtgtatctgattctaatgctgtgtataactaaaataaaaaataattatttaaagcacaggaatagggcactaaccaatgcaatgaactattacctctctctttcatgaaaagtcatacctttaattaaaagtaacccaatactacacataatatatttattgggaatatgtcaacctgttgagcaatgaaacatactgattttcatagctagtctgtaataaaacagcttaagagaaaacataaattttataatttattaacaactcaacaaggtgatctttgtattaaacatgtttctattccattcttctctatttcatgtttaaaatgttgatttccatccagtgtcatgaaatcaatgtagtaggttaataacagcatttattttttaaaatgaaataaaatacaatatttcagaatattctggaatgaatagaattgagtagttgtggctgtaattggaaaaacactgcacaattcaatattgctttcttactagaaaccctgtcctttatacttttcaaaagccttgatcctcattggaatctgatacaggagtgccaggactggtgagaatcacataaactggagaaattggtaagccagcagtattcttggtggctctttctagtccatttgcaagattctgctaggccactaagctagtttttcaatacttaaaaaatgctttcactgttacccacggtgaaaaaaatgtcagcatatatcatatgtaagtaagggtgattactgttttgtgaaacttctattttagttctatataacagagagacaaattgagagagagagagatgttggtatgagaaaggtttaaaaagtcacaaaaatgtctgttaagaccataattttgacacatgaatcttagttgcaacagttacaagctgtgtaaactctgaaaagttgcttactcttagaatctccgtttcctcatccattaagtgggaatgataatatcttcctcagatgattcttgccaagatgaaatgcaataataatccatgttacatttttcccagctcacagtagagaaggcccttagtagatgctggctttcattaccaaatgtattctcccatccatacttatcacttgccagaatcctttgccaggtggcacaattaagaatggcagtttaggaatgattttcccaactggttagaaaagattggtcaacattctctgtcaaagtacgtatttctcgttattatttctcactcattatcttgtagtaggtacatactatatttgctgttttcttttttaatttattctttggccagcataacttttttcagaaatttgtatatctacctaggagaaaaagattaatgtgtaccaacttagtgtatatgaggccatatagagatactaattattatttatttatttagagatggagtctcactttgtcacccaggctggagtgcagtggtgtgatcctggctcactgcaacctccacctcccgggttcaagcgattctcctgcctcagcctctctagtagctgagactagaggcatgtgccatcatgcccagcaaacttttgtatttttagtagagatggggtttcaccatgctggccaggctggtctcaaactcttgacatcaaatgatccacccgcattagcctactaaagttctgggattataggcatgagccaccacacccagcctacagatagtatttaataatcaggtgtaggtgatgatggtgaccattgataatatacccagagcaagggatgtgatgccatttccattctcacacctaatttgtaatgtaatcttaaacctatcttttggcaaataagccattttatgaaatgtgtatatgtattttacagaaggattctgtacttcctgaaagatggactacagattacctttaagtcgtgagcttaacttgtgcatttagaacatggctaatgtgtgaaattagcacaattcacacacacagtaagaggagcagcatgactgagtggaaacagcacatgctcttgtgcagccaggccagctctcaaaagctagcttcaccactctctgtgaaacttggacaagttaatctctaaagaaactcaattttcccatcacctgaatgggcatgttcataggccaccggtgccaagtagtgtgtaaagtatttagcacacagccttatgcagaataagcaaacacaagtattttaaaagacagcatgaagtgtgcatataacagcagaggggaggcaatctaaggaagaaggaatattgcctttccctgatgctccattttctgttttgtctttattttagattgactgctatcttaacctgcttacctgcttgcttattggggtccaatttagagttaaactggggaggtcataaatatgcatgcctattttttttttttttttttttggagatggaatcttactctgtggtccaggctggagtacagtagcgtgatctcggctctctgcaacctctgcctcccaggttcaagtgattctcctgcctcagtctcccgagtagctgagattacaggtgcatgccaccatgcccagctaatttttgtatttttagtagagacggggttttgccatgttgaccaggctggtctcaaactcctgacctcagcttcccaaagtgctgggattacaggcatgagccaccgcacccggtgatatggatgcctcttaacatgccaccagttacacactgtgtggtttgggcaagttatttaacttctctgagcctcagtttcctcatatataaatactgaacctaaacggtgttagttattgagcagactagagctgatgtgtgcaaatcagctgtcatgatgattgacaaatatagtaggtcctcaatcaatgctaaatttatgcaaatgaattttcgaggccatggaagccattgtttcattgcactgtatgtagtgtgcacttgctctgccttgattatcttatgttcctatggcagtgaatacacattctccatcccctagggaaaactgaaaggttgggtgcttcttcagagaagtaggacaatccaaaacacagacaggagttaataaccaaggaatcaaacattcagaaagttggtgagaaatagaacatgtgtttgattagatacttgtgaaaattatatcttcaattttctttggtttgtgcctgaattaaaacatcctttcctaaaatatacttccttacagtcaagcatgattttcccagatattagagcatcagttgcttgctaatttggggcattttagaaactattctggagccatctctattgtcctttatggcttggccaggatttaaaatacactaacagcacttctattatctcttgctcattttcaggatgtcttgggtatttttaaggcttctattatgactgcactgcctcatagcaatgactcctcagtttcttggagagttttaccttcccttgatctgatctttggtttttttttttattctttattttatttacagttatcttttctgacatttcaacaacttcacatatgttaagaagaaaaatcaagtaactagtagtaaaatctgtaaattcatgataacaaaagtatttgtatacatatacagaatataaattgcatagatgcaatataaattgcataccactgtgactatacatgactaagaaaccaaatacatgcttcattgctacatacccttgttttaccttactttcctcatccatagactgggccttttttttttttttttgagacagagtcttgctctgtcaccccggctggagtgcaatggcgcaatcttggctcactgcaacctccacctcccgggttcaagtgattctcctgcctcaacctcccgagtagctgggattacaggcgtgcaccaccacacccggctaatttttgtatttttagtagaaacggggtttcaccatgttggtcaagctggtctcgaactcctgatcttgtgatccacccgccttggcctcccaaagtgctgggattacaggcataagccaccgcacccagctggcaattctatttatctgtgcacattttcagagatgaaattgtcctatgaaaagttgtatttggtgatcaacaactatatttttatgaaacagccaaattgtattttgaaataaataagaataacttcccagacggtgggaagacttgttattgtcattatagctgttttcgcttaggtgacaagagtagtttctgagatgtatggaagtattgaagagtttaattatattattctcctcctaccgggggcttaaacactcatactgagccctcctttcatagaagcagattcaataacaacagcaataacaacaagcaaaacccaccggtgaagactgagtcttgccacaaaacaaccacgtttcggggacacaaattatgtgccccacagaacaaccctgttagtggaagaggtgcatcttacaggttttcctatctctgtacagccagctttttcagaagttgagtttgccttcattttgattaggacagttagttgaagcacagatagatccttaagcctttatttttctcttcttccgttctttatattttctttgtatgtgcgtttgtgtgtggaggaaggccaagtttatattgcctataggaacattgataaatttgccaaaatatgagggccttaatgttagatgtcctttaatatgtctatgtattatataatttatataaaatataaaattactactgggccttgatataaaaatacctaccacaatcctttttttcttttcctttttttaaattgcactttaacttgtatagaaaatactttgattcagtttgcaaatgaaacaatacgacactgtttggcctgagatcacggactagcctggtacttctcttgaaactttgaactatgtgtttgtgaggtgagcatttatgtatctgtggcagtgtgttagcagaaagattcctatacagctagaattcaatgttagatggtatttttaaagctgaaattagattctctgctttgattattccattgtgggtccccagttatattttagtgtccttcaccctttcctcctttattatttataacctgtactctttgagcaatgaccagtactaatctgtaaccttctgtccttctgcctgattcgctgccttttttgaaactccaagattgaagcatatattctcagagtttctgttaaaaaatatattacatttttttcatatttctgagcctgaaataagaatcatttctggattttctagtctcattcattttcagtaggccagcttcaaaaaagagagcaagaaagagagaggaggaagcataaagaaagcccatttttgcattttttgtatttattatcttataatatctctcacacgaacacacaaatatacttttgcatatacatttgttaaaaaaaaatattgatttctagattaatgcactgggtctttctctcttcccttgccttgccttttcaaacctccaccttccatccacaggagctggacctaaataataatcaaaacaaagaatagcaattcatttgttcttgaggtgcactaaaaagaagtggggcataaagcagcattagcagcaaattccttaaggaccaaagactcccactggttccaatctcctgaatggtgcctgtctctcccatgcagctaatgactgaaatgggatccattgccaccgggagcttttaatttctttacattgttcaggtccctgtgatgcaatgcaaagtgacagcttccattccagtcttgctcattatcagctcttacacgagacagcaaggacagatgtctttatctgcatgttagacctaaccttcgtcaccatgtaagctgaattcagccttggctaaggtataaggtatacagcactgtgggcatgcttataaatcatctcatatccagggggatagggaaaggaaaaggaaagtggaggcaaactttggtttggttaaaagccaccacttggagggcagggaacttctgaggaaggtccaactgtgagaagggcatgcaaatttcaggtgtggattgggaagtgaatgagatgtgccttggtttgttctggtgtctagtcttgactgtcatatttggccatgagcactccgtcattaagtaggatgttgagtcagtccctgctagttaagtacgtgttgtgagtttcttttacttcttctagaaatggctgcatgaactacagcaaaatttgtagatttctgccatactcagtctatgtttagaaatgaaaataattaagactggcctaagattttcctaagcagacctcagccaacaaagatggtccaaattctcggtatattgatgattcagatctatctcctgaaagctaacactctctaatgctgcatgtgagaaagctaaaaccaatagcgtatgtaatttgtcttaaatgtatatggaaatcagagatacacatagatatttacaatccataccaacacatgcttatctgcaaggtggcttattggaatcaaatgtaagtagaataatttattagaccagtgggctaaagaaatagattaaagactttaaaagcagtgaaatatggttttgaccatcacagcccagtagaaattaaatgcaagccaagtatgtaattttaaactttctagtagccacattaaaaaaataactaaagacaaacaaggaattaattttaacaatatattttatttaacctcatatataaaaatgctatcatttgaagatgtaaattaaatgtattcattagataaaaatgtaaagattattagtgagatattttacattctcttttgtacttggtctttgaaatccagtatgtagtttacactgatagcatatcacacttgaatttgagacgttttaagtgctcagtagccacatgtggcttgtggctgcgataataacacagcataagacagacatggtgactcataagaagccatgtttccttaccaaaaacgtgtctattttagaaatgatgaagaggatcttggtagtatcttggcttaggtagggaatatttattcattcatttagtcattcaagcaatattcaaagtgtatcatgtactaggcactggagtaaagaatggggaccatgtatagaaacgaaaaagacaagcaagatcttttctaccaatgagctgacatcctactgggggagacaggaagaaagagataactaatatataatccatcagatggagacaagggctatgaagaaaaataaagcagtgtgaagaactggagcgtgatgggggtaccatgctagattagcgggggctgacaaggtgtcacataaggggacatttgagctgagccctgaatgaagggagagattgagtcacgtggagatgtggggaaagtttgtttcgggaagcagctggaaaggctgtgaggcagaaaggtgcattttatatgatcctgtaggccatgattaggatttaaatttactctaagtaagatgaaaagccagtggaattttttttttttttttttttttttgagacggagtcttgctctgtcgcccaggctggagtgcagtggtgcaatctctgctcactgcaaactctgcctcccgggttcacggcattctcctgcctcagcctcccaagtagctgggaccacaggtgcccaccaccacgcccggctaattttttgtgttttagtagagatggggtttcaccgtgttagccaggatggtctcgatcccctgacctcgtgatccgcccacctcggcctcccaaagtgctaggattacaggtgtgagccactgtgcccggccgccagtggaaagttttgagctaatatgtgacaagatctggatgcttcatggagaagaagcagcttagaaaatatcatgtatatgtatatgcatacttttatattttaaaaaatttatttcccttttaactacatcatttctataagattaaattcaatattcaattcagtcacatttctgaactctgctaaaacaatgctattattaaccaaaaaattaatggtgaaatctgcctcccaaatgtacaggagctgaatcctagacataaattgcatgttagggtggtgcagagctaggcagctagcctgagcattagcaaaatttggcacatgtggattattacatataaatgggttaccatagatgcatatcttaattttatgattatctgtgggaaatattcctgcataaggatgtttggactttttggtgtgtaaatgcagaattctagtctactgtcagtctttacagaaaagtctgattattatcagtgacgaatgtgcacaggatgaaattggtggtattttattcttattcaatgtgtttattgctaggaaacaagaaagaaaaccaaagatatccagttgcttggatctatgatcgccatgtgttctcaggcagtctggcagccagatagaaaccatttcttatctcctattagaatcacaagttattcctggtctccaatttaagttttctgtagagtgaagaaagtacatttacctctgaaaaggaattcaactgaaattcagtgggagtatattagactctaagaacaaatctcttgctagcatccttatttagtaaaagactctcttaatgcagttaggatgaaattcaggatcaggataagagtggatattgcttttggaatatcatggtgaaaataaacatacctgaaatgacatgaatgcccctcaggagttcagactgagtaaacggtgctggcaaaggattcaaaagggagattctttatcttagtaattggtcatttcttagtgtgttcagaaaaattgtcttttgagttgtgtctggccatcatttctctgctttcttaggagaatggctttctccttgggaatctcaaggttagcaactccaaagatgtgagttcaagtcccaagcttcataagaatagaaattctgcctatcttgttcactattgcattcttattgcctagaaaggtgcttagcatatagtagttgctctatgaatatcagataaaggaaatttgacctaaactgatttaaatatacattgttatgtaggaaaaccttaagaagtataactgattcctctcttctcacaccctcccaaagctttgccctcagcttaactgacaatggacttttacaatttaattttgagatgatgggcattctttggcatttaaccccaatgcctgtttgttaattgtgatattatactcaaactggtaacaattttttttcatgtgtccaggtggctgagagacaatagatatatagatagatagatagatagatagatagatagatagatagatagactgatggctccatacacatcattttttaacacaatttgaaggatttatctttcactaggcaacagttcaaacttcaaagggcattattataattatttaaaaaatttttttcggccgggcgctgtggctcacgcctgggatcccagcactttgggaggccgaggcgggcagaccaagaggtcaggagattgaaaccatcctggctaacacggtgtgaaatcccgactctactaaaaaatacaaaaaaattagccgggcgtggtggcaggtgcctgtagtcccagccacttgggaggctgaggcaggagaatggcatgaacccgggaggtggagcttgcagcgagccaaaatcgtgccactgcactctagcctgggcgacagagcgagactccatctcaaaaaaaaaaaaaaaaaaaaaaaatttcacagcatgcacttaagtaaaataccattttttttaaagtaaagaaaggggtaggtgtgtgtgtgtgtgtgtgtgtgtgtgtgtgtgttttaatgtcttttcctttctataggatatttattaactataggaaaaattatatttaatatcagatgaaacaaaatgaatgaaggtaatgaaattcatataattactcaccacccggaaggcaggagaacactgcagttacagaattagagacttgcatttttccttaaggatttcaactctttaaatacaggatgcctgatttagacgcacatgggccatccaaatgacttagttgacagtacatggaacagcatcatagctgcaaaaaattcacttgagagaagctacgtaagcacaagcaacctgctgagctaagtgtgctgtggcttggacttttatctccctacacaaaaggaaaatgaaactacatacagcaaataagggattccttcatagattgtgtttttcttgaaaaagaagttctgcaaatatatgtggaaaactcactgaatcataatagagtttattactcagaagaacacttttaaaaatcagattttttttttcaaacaggaggaaaataatttgtttaaaaaacatctcttctgggccatgtcctcaaatgtgcctgcatttttggatgctaagtagagtctgggtggaattgtcagtcaccccaaatgaacaagtggtatctgaaaagtcactgtttaatgaaaagggtacacttgggatttggccgccttggctggaggaggaatccggcctttcggcgttcccacctgctgctacgggcgccgggagcctagttgctgcgtctcacggatgcaggtgaacccagcgctgaaccactttcacagtccagaaagcatgacattccttgttaccagtgggaggaaaggctaattgagaagtgtgtataaaggctgtaatgagtagcatttacatgtattgattagaagtagggccaccgtttctcatttatcaccaccagcagctgtgaaattttccccacgtcgattggcacggctcagattcccgctcctccggtcctttattgcttttttccccttcccctcctgaaccagagtggtgatccaccagctggaatggcctggtaattactccagctcctccaccagctgccacaattgccaaactgctggagtgaaaaattccatcccgcatttccgattttttacattaccattgcataatcatatttgacgaataattaacctgggttaatacttcagggagccatttgcaagtaaattgataagctgagtgctgtaacggctcacaagggccgaggactttggcggtggcacgctgctgctggtcctcgctgccatcaagggagtgttctttttgactgcctgaactgaccgaggcggccaccctttaagaagagcccttgattcggtcgagtcggaggagaaaagaccctaaatctacggccatcctgagtggctggaatctcctccttcttaaagagctagacccattttctatatcctggctgtgaaatgggtatttcaagtgccatagcccatgttgagaaattcactaagtcaggaggttgtgagttggtattcaggaaattacaacctttattttatcttctgatctttctcctgcacagtggagaggctcctttgactggctagagagtgatttgcttcccttccgatgagaggcatctattttgttttatattttttttttatgtttttaaatttttaaatgttgtgggtacatagtaggtgtgtatctttatggggtgcataagatgttttgatgcaggcacacaatgcgtaataatcacatcatggaagatggggtatccatcccctcaagcacttatcctttgtgttacaaacaatccaattatactttttagttattttaaaatgtacaattaaattattattgactatagtcaccctgttatgctatcaaatactaggccatatgagaggcatctgttttggaagcaaaggaagtgtgtgccagacagagggaatgagtgaaagtaacggataatgaccatagttccagatcaaatgtaatttgtctggtcattttggaaaactgtaagactacagcaatagaagagcatcacagtttaaccatctgaattcaaatttgctcataattccatttgttgtggccagtcagaacactgaattttttttcagttgcttagttctcataccttctaattttttatctcttcatccattcatttcaggccatactctcgttcaaggctaatcagagaggcaaatgatgaccctacaatttcagaaataatgtttgcatcatttgtggttgagctttggcatgtgagcgagtgttcctaaagtggaaccagtgtgtaccagcccagcacaaagtcagcactcagcatttgtcaccgtgtgaggtatggcaaggaagagcagctcctttcagactcaactgtagctctaagtgaaatcaatggccgaacaatctaacacaattggtcacatattgatagaattaaacactgctgttaacgtggcttgtcattgatctgacaaaaatagagttcagagtaaaagtagcctgaagcctttggactctgtgtttatggagaagaggtgtggggcgaggaaggggaaggggaaaggaacatgagaattattttgctccgcctacttaagatggatttttttttcttcacttaccgtacttcactctggaacacattttcaggactgccttttttccccctcattagtgacatggaaatggagactagtttaaagttaagatatgatgtcgaactaacatctgtctctattaagaacatctccttgatggtgtatgagattacctctttgacaaaagtcctgtagattcttgtggacaatgaaacaagtcaatcccgctcataaaacatcacattctactatgtcagatagtaagtactgcctacaagcaaggacctgcctatcaaatataaattctgaaagtgttttctgtcatttgcatgcaatcagataatattgcaaactacctgggccaggagagcctggccgtgtcattccttgtgatgtctctgagtgttgtagtcagctgttgctggggcttcatctgccacaggcacgcatgtgactaatacgagaatgtccccttgtcagagagcggcagctgctgcatgtatgtagcctgtgtgttgtggtgtgagtcaaaagcaccaacatcaatagctgtgatttctaaagtgctgtgtaaaagagagcagggctgtgtcagtgtcttatctgcaatgagtagtcaagagaagagatgtgtttcaaaagttgggtctccttctttactaggtttcaaaatgattatgggttcgttggtgaatgtactcaagaatttggataagaaatgtttttctctacgatgttgcctgtttagtttctttaaagcattctcacaatctataattatcttctgcatttgtttaccagtttaatgtgtgttgctcccagtagaatgtaaactccatgaatacaataacattgtcttgttctccttagtgtcaacctaacacctacccaggggcacagccacagcctatggcttggtagactgtgcactgtacaattcactgtactatgtgatattcacatagaccacaatgtacagcctgtgtaagctctacatggcagccctgaggggctggaacatagtagaaactcaataaataccttagaaataaatgcataaatttttttctttctgtttttttagaccgtctcgccccattgctcaggctggagtacagtggcatgatcatggctcactacagccttgacctcttgggctcaagggatcctcccacctcagcctcctgagtagctggaactacaggcgtgtaccaccatgaccggctaattttttattttttgtagagatagagtttcactatattgctctcaggctggtttcaaactcctgggctccagcaatcctcctgcctttgtcgtccaaaatgctggtattacaggcatgagccaccaagcccagccagattttttctgatattatttttcttatgttacagtggacagaaactatcacttactttattgccgaatgatgaataactataaggcagtggtttttagcatatatgagaatcacctggtaggcttttaaaagcaggactagttgtgccctgccctcaggggtccctgattcagtaggtctggagtgggaccagcaaccttcttaggggatgctggtgctgctcttctggagccacactttcagaaccattgctgtaagatccacagatcatgataatgataatggtgatgagagatcatgccagtgacagtctttctcttcccttcttcattctgtctttacattggagctcagttactgtcttgaaagtgtggtctaaactttaatcctgctgccaacttttgatgactacttgtatctatagctcaaagtccaaattctttcatgtggtgcttgaagccatcttccacctttggaaggcactagtcattctccaataccccactccaatctgtgtgcaagctccaggcaggcttagacccacgtaccccaactctggctatatatcagaatcacccaaggagctctcagaaagtacagatggctagtctctgttccggagattctgatttgataggtcccaaatgagtcctgtattttttaaaagcttcgcaagtgcattaaactaccaacttatgagatgtgggcaagatacagtcaaaggcaagttcataattttgtaatatttcttcataaaagaagaatgaataaaaataaatgaaataggcaataaccttaaaaagttatgaagagaacaataaaagaaaatgtatagactgaaataaaaatgaagacgagtaaaattcagtaacttagagaactaaaaacaaatagaaggaaaaattcaatccaggaagcagctcttaaactaacaagacatgagcttctgataaatatatgaacaaaaatatatgccaagatatctgaaaatctggatgaaatagacaatttatgtgaaagcagttatgagcattgactcaaaaacttcagaaatatcagatatagtctattaactcaaatatttatcaagtacttactatatatcaggcactgacctaggcagagggtccagcactggacaaattaggcaaaaatctcagccattgtggcatttactttctgtgaacctaagtctgacagcccacatacagagggcaataacccaatcacatatattgggttggaaaaatgtaagcacaagaccaggaaactatattcaaaagtaccttagaatgactactcatccacactcattccagggttatgatagtttaatatttttaacaatgcattaatacatcaagtcaataagcctactaatttaaaaaatgtttatctcggtggatattcaataaaattgaatatctattcctgataaaaaacctcttggaacactaacaggaggatacgttctcaacctgataaagaaaatagaaactaaggtcaacatcacatttcattgtgaaggtatttccatttaaagcagagaaaagaaatgaattctcactgtcaccattgttatttagtattgtctgaaagttccagtaaatacaataaaccatgaaaataagaataactatagaaaagggaagtaaaattatggttctgtgatgacagcatgattagacataccttggcaatccaggagcaccgctaaataatgttttgaattaataagcaagttcatcaaaagtacaatggctgcaggataaatatacaagaaccaatgacatttctatatagcagcaataaacattgtagaatatatagtagcaactacaactatgaattaccaaagaatgtgtgacacctatatgaagaaaaccacaaaattttattgagcaatatgaaagaatatttgactaaatggaaatgtatattgcattcttgcatgggagtactgtaaaataatatgatgttacttttgcccaaattaacaattttcacataattccaagcaaaatatataggggactatctggttggcttgacaaaacctaaataaaaaaataaaaaatttaaatactgtaaaaaatttgaaaagtaaattattagggtgaaggtggaatagaacttaccctaccagataccaaaatgtattgtggtgctataaacactggaactgcaaggtaccgtctcaagaactaaaggtcaaatcaaagaacagttacagacacttctgagatagatcctaggatatgtgaatgttccaggcagtgttattaaaatagtatgcaccaacgtcctggggtagaaaacagtgggaatgttaaagaactgaaggctgatgtggctggggtgtaaataagtttagtacacatttgtacaggcttttaagaaggcaattttaatatgcttgtaaaataggcaattttaaatatatgataaagagtgctttttgtctcaatgattgttccttaaataatcttagaaggatgtaatccatagtgcagatcagctattaagaatggaggtagctgggcatggtagctcacacctgtaatcccagcactttgggaggctgagacgggaggatcactcgagaccaagagttcaaggtcagcctgagcaacatagcaagatcccatcttaaaaaaaaaaaaagccaggtgtggtggtgtacgactgtagtcctagctactcaggaggctgagatgggtcccagctatgcaggaggctgagatgggaggatcacttgagcccaggaggtcaaggctgcagtcagctgcaattgtgccactgcactccagcctgggtgacagagtgagaccctgtcaaaaaaaaaaaaaaaaaaaaagagtggagatgttccttacaacattgttaacagaagcactaaaactcaaaataacttaaatattaactataatttattgtatattatcagaaagctaaaagaggattttaaatgctcaccaagcaaagaaatgattaatgtttgaaatggtggatatgctaattaccctgatttgataattacacactgtatcaaaatatcactctgtattttataaataagtacaattattatgagtcaactgaaaagaaaaaaggaaagttaagaagccaggtacacacaccaagaaatgacttaaatggtaagcaacaagggacatgtcaaataaattacagcacctccatacattggaatattttgaaattatttaaaaagtatgatttgaatgacccaaatatattgttaagtgaaagggcaggattcaaaactatatttgctatacaattccatcttccaatcaatatacacacatgaaatatcatagagagaaatataacacgttgttaacagtgattacttagaggatggtggccttacagattcttttatagttaaagagctttcaacttttcaaaaattttaattggttgtcacaaaaaagacaacatacagaaaaataaacattaaacactcctgatgtcatttcatgcccagctcaactatcacctcttctctgaattcttcagagattccccaatagcattactctttataaaccctatgtacctctttataatcccatactttacattcctggatgagttacagttcaacctgtgcatattgatcttcccacttacttccaagcttcttgggggtgcaggccttaaccaggaagtccctgtgagaaatatcacaaaaccctgcagagagattcctataagcctacagtcctgtgaagaggcctacacctaacttgaggactgagtaatgtgagcacaaatctggtgggtgtcatcatgtgtattacaggaattgggggtctgtaagattttgctattaaattaggcaacagtacttttctgcatgctttttgaatataaggaaacagtattaagtaataattagaagaaaagcattcagacattagaccttagaaaaattaacctttataaacctctgtttccttatgaaactataaaatgagaagagcaatattacttataggtggatgttggtgagaaataaattaggtgatgcaaatttgtaggcgaagtgcctggcccacagtcagtctgttacataatacatatatcaccaagaaaattctattatttaaataggggtccccaacccctggatcatggatcagtactcgtcagtagcctgttagcaaccaggcctcacagcaggagtaagcagtggacaagcaagtgaagcttcatctgtatttatagcaactcttcatcactcacattaccacctgagctccgcctcctgtcagatcagcggcagcattagattctcataggagcacaaaccccattgtgaactgtgtgtgtgagggatctaggttgtgcacttcttatgagaatctaatgcctgatgatctgtcactgtctcccgtcatccccagatgggaccatctagttgaaagaaaacaagctcagggctcccactgattctacattatggtgagttgtataattatttcattatatgttacaatgtaataataatagaaataaagtacacaataaatgtaatgtgcttaaatcatccccaaaccacccctgccccccaggtccatggaagaaatggtcttccaccaaactggtccctgggattgctgatttacagtgatctaattggcacagctcatctttccctttcacgtcatggagtcataatttgactctcccctccttcacctcctcttgcttgaacctagtaaattagaatttatcacctgttgggagagagagctatcattcattgcagggtcagcttcatgggcaagaaacctgtgcagtcgcttggcttgtgcacagaggggcctgtgtgtggttgaatgctctgttgtcaccctcttgagctttttaagaatttttgaaccaggggccctgcagcttcattttgcactgggcactgcaaattatgtagccacttctgttaagtaagctatcccatcttactgatccctagcagttgctgaaaggtatgctcactgatagaaatgtaatagtttccagattattgaggcattagaggtgtttgacttttctaactttgctcgtgtataatttgagaaaaccgcctttgccccagagaggcagcatctagggagactgggcttaggagatcatttcactgctgatgggctgatgtttgctgttgattttatgagtcccagtttagatttcttctgctctgcctgccctgtctgttacctgagttatttatagaaacaaccatcactcttgctacaaaagcaaactactatttgttttatcttagttttctaaataaattgctaaaagccacattgctcctggttttggtggcttttgctgttttccaatcctaatactctggatgctgttttgcaagattggaaccaactccggccacgatttgtgctagattctccttctcaagtgatgtctatttcagaagccaggctgggaaggatttttgcagctctttaatgtgcaaacagaagaggatttctttgaatcagggcagatttctgggtggttccacatggcctctaaatccagacagtgtggacatgagggatgtggcccaccttcctgacttggtctgacttcttgatttgcagattgatcctcctggaaaggtatttgagtcttgtttgcacttaacggctattctggctctaggaaagactcaagaacaatcagtagtagctagatgatttggactagggttgaaaagtagatgtcaatgccatttttatagcattgaagaaggcaggaattcacattagagacagtcaggagactaatagcttcattaaccagctaccgtgagatccactctctgagcctcagtttttgtcatacataaagggtgatcttgttacttatccctccccacatcatagggttgttgtaaggatcaaatgggatgggaaagagctctttattaatcctgcaaatgtatcagagctgtactctgtgatgcctacttttacaaatctaagcacagaattaaagtttttttcaattttccaccctggtgtccctccacctcccaattttaggtggacaggagtctcttggcagagtgaatagcatatgctaaggggtggaggctaaagtggcaccatctgtttagttccaaaatggctagggcataggggagtgcattagttttatctaaggaccacctcaaactggatggttgaaaataacagaaatttattctttcacagtttagaggtgagaagtagaaatcaaagtgtcagcagggttgattccctctagggactctaggggacaatctgttcctctttcagtttctggtggctgctggcagccattggcttgtggccacatcatcccagtctctttttccatgacctatttcctcatcctttgtgtgtggtcaaatctccctatgcctccctctttttaggacctacctagataatccaggataatcttcctatctcaagagtcttaactttatcacatctgcaaagacccttttttgccacaacattcagaagttgcaaggattcagaagtggccatctctgtggggcgctattctgcctgccatggagagggagatggaaagatctcgaaagatcatttaagccttgctcaggtatttggaatgtatcctgagtgcagtgaggagtcaccaggggttttaagagtctgtggaggtgggctcgagggtcaggagcagaggcaggatgtctggttaggacaccactgcaacacaggggcccatgcctacaagtaggaggaagccttgtgctcccttttgggattgtggagaggctgcagcttgtggccagtcttaacgtcagaagttattccgagcactccctgagcctcctggtgctttgacttaactcacactagggcctctaaacctcaatgtcaaacattcagggggttgtgttctggcaagaggtgcaactgtttttgtgttctcttccttttgcttggaaaagaatgagagcgcataaaagctctcattattgataattattgattatcaatacaaaatctcacctttttcaggagtatttctgattgaatgagtaacatagtcttaggaaagcatcttggttgggatttcagatataaggaagcagttggagggagtttgggggaaatagattttcctgccctctgtgggcaaagtctaccctgttctttggagttttccaaatcccagctcacacccagacatctgaacctactcagtttgatgaggaaagatgaagaggccagcctaaagctctgatttatatttattctgcaagatatcaatggcctcattttactaaagtctattgcattctttgtatgtcttaaacacagttccacagaattttaatgctttccacttcaacccttaaaacttatctatagttccaaaagtatatatcttaatactgctaggaaggatgaaatatcatggtcttaaatttcttttctcagtctcaaaataaactatcaataataaccataatgaatatttgtattatttttaaaaaagatgtttacagatggaaatttaggaatgccacgaaagaagactgaaaaaagtattaaaaatattgtcacaccagaccgggcacggtggctcatgcctgtaatcccagcactttgggaggccgaggtgagcggatcacgaggtcaggagatcaagaccagcctggccaatatggtgaaactccatctctaccaaaaatacgaaaaattagccaggtggggtggcccacacctgtagtcccacctactcaggaggctgaggcagaataatcacttgaactcaggagatggaggttgcagtgagcggagatcgtgccactgtactccagcctaggtgacagagcaagactcggtctaaagaaaaacaacaaccaaaaaaaaaacaatattgtcacaccaaaccaagccttgctcttctaataaaactccaaaatgtcttctaatgtaaggtcatctctttaactcttttgtgaagagcaaatggtacatgctgaagcatggaggcctggcttgtggctggcagctgcactgtgcctttgcaggaatctcttggttattggtctgctcattgttctcagaacattataccgtgagccgtagaaaagaatgttcatgtgatttgttgtaccattgtgtttatattttctgtagggcaggagaggtgggtaatgaactgctgaaaattgtttacaagcttgtagatgtccctatgcatttagctgcaaatctgtattaaaggaagagaaagaattcactttggtaactaatgaaaaagaaaagaaaggtaagagctgctttttgggaacaaataaaaatattacctaataaagttcagcacacaatgaaattaggttttccatgaaacttcataaacctttgattttctttccttattgatatttttttgttgaattgtaaattctcttggctttcagaaatacgttgagtcctggccctgaaagaacttagtatttgttaaattcctgcttatttgagcttctcttttgctttaatacagtataaaagaaaaaaagttatagcacccttacaccttctttcctgtaattcattcccgagttaatgaatgttagcagttttgtgtgtaatcttccacatgtcatatgcttttgaaacattaaaaaacatgtaaatgtatatggatctataaaatcatatgtacatttatttatctaacagacagttaaagcaataatttgctaactaaacagttttttatgaaattgttgtatgtatcatctctgttctagatgctgaagatacagcatggaacaaaactagtataaacccctgccttcatttgcattctagtggattgtttttttctgaagaaaatctcaagatcagaagtagctgtggcatagagaagtacatgcaatgaggatattatgcatcaaaaccactttaggaagttctctcgcctttggtggtctccaagttggtcctcataatggtcaagtttagcatcaaaagaggctgccaaaggacctagtgaactgataaaacgaaatgattacctcattgtgttaagcactattctctttgtgggcaaggcaagaaaccgagttccgtatacagagctcaccttcacagggtttggcctaattgaggagataaaatgtttactatggtttcctgagaactgctgaaggagcatgcagaagagttgaagccaggtctagttgatcagtgaagctgtctgggaagctctctgctcattagaaacttcaaagatgatagagaattctaaatttattaaatagcattctatgcaaaagagatagcaatgtttacccaaacagtgtctgctttataagcaagatggcttgactgaccagagatggacatttggggaataagaggcacttaaggagtgagggagctgaaggagtgaagactcccagagctgaggtttttgtattagtctttgaacttccaggaccaacctagggcaagtttgggcccattgcagtcacccagataatttttaaaataaaataaatgggctggggtgagggtaaaaggaggaactttattgaggatctggacagttagattgaagagtttaaacatttattattttattctatgtagaaggattattgaactacgtcaattattgaagaaactgaattcctgagaaatcttcaaaagatttcaaaagttgaatcaaggaactatggacaagggagcaaaagaggctgacatatttaggaagtctaaagaggaggatcacaaccacaagccaaatagcacatcccatcaaaataggtcttccttcttatttctcttcctccctcccttccttctctctttccttccttcttcaaatatttataaagtacctttgaggtgtcaggcactgagaatacgaaattgaacacaacttgggctcttttaagaatttgccttttaaaaagaaaactactgtatctccttgcttctgaataaagtcacaggataaataatataaaaagctcacttatgataagaagtattgagatcttatcatcatatataggaaataaaaccatgttggactggaagagtctgttattttaaaaagtttctcatattgcataattggttctgaagaactatggataaacctaataatttcaaggtagtgtcctatttcctatgatatgcattataatttctttggagctatatcttaattgttgatggcctttcaatatgctatagtgtctatcagtttcttttaggcttattctatcacaattttcattctctattaatcccctaagtgtctctataagtaaataactagattatttggaaagttgctgtttaaagaactacttgtaagttcaagtggcctttggagtgtgaataagtacccataattcatctatgatcaggcaacacctttgtgagtttctcttatggtttgaatggtgtttactgctttctagtacctccacgggaatcatcaactatctttctaaatgcttactttttatgtgaaagatctcaggcaaaactgtcatttggtgtaattattatagcaaatcctttagaattgtccaagggtatattcttcttccagggcattagacacactgcaggaacacagctctggagatttcaagggtcctccttgctcctcctggaggagtatttgatctatggtagcctcctttctccactggagttcaagtggcccaggtcattattgactcatgcggaatttacaatttacaggcaagagattgatggcttctgcaatgaacgctttcattccttcacatagcagcacatttggtcacttagagtggacatttcatgccaattttttagtggcaccttcttcagatttctctctccacttaaatctgatatttcaagagaaaataaaaaagtaaactattttttgccactctagagtatctctagtgtctttttacaaaaattcactcaatatcaaaacaaagagtttatttcctccataagttaagaattaataagttcattgagaaatctgcagtgagacaaggtactatgcttacaaaaaaatctactttgaaaacaactacattgccattttagaacatacttggaattggtgagcatatgatgtttatgagagagagagaaccagatcacacagtttcgaccagtgtatgccatttattataagtaatcaaataaaacctgcctgagcagagagaagtaactccttggcacatttgttgagcctatttgcaaatgtgtagtgttgactgacctgcattgtaaccttcttacttctaaccggcaatggttttaacaggtcctaatgtaactggaatgactcttaaagggttttccaagtgtttttatttgctccgaaatattctcaccctttgactgcagttaggtatttgggtctggggcattttgagttccttgggcaatttgtagggaaagaacagctccagtggaaaggttggtaccccagacttctcacccctttctcagaagctgctttgtacagttttaagggtgtggggttgtggatgattcttattgtattatgttttctttaagagagagaaagaataacataacccatcctctattcatttttacttatttgcttttctcatcctggatccagaaagggcatgaggaagcttacctgcacagagatcacacaaggaaaactgcaatttaaaataggtagaggaggaaattacaaagagaaaatgcactcatttttaaaacaaatacctattgagtgcctgctatgtgcacagaattgagctgagcagtaaagcttcagggatgagctgaacacttctcttgcatggagcttacagtctaagggagaaacaaatgcttatcaaataaccacatgtgctaaatgttatgggaggaagagcactggaaatgatgatctaatttacttcaaaggagggaggaggcatatgattaactttccctgaaggctgaataaggatgaactgcttttggagggtgggcatggtagtggtgggagaatgttaatgtgactgtaatggaaccatggatgccaaggcctaggggacacaggacttgatgcttttgaggaagcaaagggtgcctgagggcaggaaggcagagggaggcagggtgaggaactaggccagagggtaggtggggcagctcaggaaacctctttgtaagagccatcatgggccattggaggcaacagcaggagagtgatatgattagatttggttttacaatgaaaacaggaaagataaaatgaagttctgggtaaggtgagcacacccaaatctaaactgtatagtttgatagccacgtttgatagctgggatcgcagtttagagagagaaaagcaggaaagtgcttagcagtggttgggaagagatgtagctcagcctgagttaggaggccccttcaaggccccagggagggctgggcttcaagttgtgggtttcttcagtgaaggtgatggtggtgagttgatagaaattattttatttctgattctcatcgaggcacaggaaactgagactcaggagtagaatgagttgcccaaggtcacactacatattcagcgcacagtggactctttatccccaggcaaggggtctttccaccaggctgctttctatgctccaaataattagttcataccatttaagtaattttatagagaacttaatggcttgaatatttttaaaaatatataatattatctggaaaaattaggttataaaaatataggtacaaaaaagagcttaactgcataaatacatttccatatatttctatgtgaatttgcatatacacatagaaaaagtcatagaagaatgtgtattaaaacattatattatctgagtggtgggactacagacagggtttatcaaattctttattttcttttatactttctaaatgttctacaataacaatgttattatttaaaaaattcttaggttgtatattcggttggtacaaaagtaattggggtgtttgccacacttttaatggcaaaaaccacaattactttcttacaaacctaatggacattttctgtctgataaaatttccaggaaaactaagtataacataatcaagtgaatcctactgcaagtatagggcatatttatgtgtatttacttgtaggagacgtgtgagctgtttggacatgagtgtacagaacaaaaagattctggaaaaatacaaatttaacctatatgggagttgaggtcgcttgtaaactaataaagaatgaacaaggaaacaggttttcatttgtaaacattgatttttatgaaacatactttgaaagggatggagaaagtcccaggccagggtaggttctctccaatctctttcccttttttgtcttccattgtaaaaacactccagtgtttttgcatttctgttcttcttccaactcttcacatggcaacttagagaagtgggaagagttggattattggaggaacatgggatgctctggaaatttcagaggaaatcaacttctctcaaaccagagtacaaacaggtaaccttgggatatagcttgtcttagattgcctgatttgtgtcctatacttcatttcagggagacctccctgctgcaggagccccacacacctagaagagatggaaatctgcagcccacactcacttttatgcagtctatgaccatacacactcatgcacactctccaaatcttctaaagtagtttttaaatacttcaaatgttttccaaaggaggcatcacttctttccacccctaggcactgcccacaaccatgccctatttaattactttcaccatacatgaatatggcagaagccctctcaggacaagagaaaccttttaacaactagggtggcccttctgcccatcagcagaaaagctggcacagaacagaaaggaattttcatcttacctaggatatggttgacctttttgccagtgggcacttttctgtagactggtggctttacaagttcaggttggaccttcttgagaattgacaggatttgaccaggggccaaacctgtgacatctaggttcagaaactagttcaccttctgatcatgttctgaactctggttgcctcttattttctacccacttcttgggttcagagtcccacatttttcttctgagttttgatacgataatttctagttatctctggcataaccatgtgcttgtcccagcatctattccttgggttgacactgattttggatatcctccccaggaatagaggaatagtgttaactatgatgataatgatgttgatgatgatagtgataatggtgatgatgataatgataatgatggtgatgatgatgatgataatgatgataatgatggtgatgatgataatgatgattaccacttcatgaatgctgtccatggatattgctaaatgagctgatgttcatggcaactgtattagagaatattgtcatcctcccatttgcaaaagagaaacaatgaaagaggttaagtgacttgtctaaattaacctagctagtgaaacacagatctgccattccaaacatgtgtcttactccagagatactgcattatcaaaatggttgtgggaaacattgagtggcaggagttgtgtagtgatcgcgagatgatgtggatcctgtggatactgacatgtaaaaattttgtcagtaaagtgtggaaggacggggagtttcctgggaaggatgagggcatactttttgatagtagaaccttgagcatatttatttgctgaggagaaagcactgatagagaagttgaagatccaggagagggagggaggggattgttgatgagggaggactctgaggaagcagcagagaaggggtcaaggggttatcagacttgctgaggctctcctgagttctggatgatgtggtgccttattctcactccattcctcactgtctccctcggtacctcaggcaagtcaccccatctctagacaagatgtggactttgcaatctattgttgattatgaacttccatcaattagcttatgcagaggttcagtctatatccagccatgtacttacttgcagggaatattatggcaaaatctcatcagaatacttctttttttaagcattaatatccagtgtttttatttatttgttaatttttaaaataaattttattgtgtataatcgaagtttacaacttgatgttatgcgatacataaagatagtgaaatggctgctgtagtgaagcagactaacatatctgtcatctcacataattataatttttgtgataagagcagctaaaatctatttatttcacaaaaatgtttaatacaggacaactttattaactttagtcctcacgttgtacatcaggtctctgaacttgttcatcctacttatttgctattttgtatcctttgaaccacatctccccatttcctcaccctctacctcctgccgatcgtaaccactgtttcattctctgtgtatttgagccctttatatatatgtgtgtgtatatatatatgtgagatcaagcaaaatattccccatataaatgagatcaagcaaaacttttgtgtttctggcttatttcgcttagcataatgcctttcagtttcatccattttgtggcaaatggcaagatttcctttttttttttttttcttgagacggagtctcgctctgtcgcccaggctggagtgcagtggcacaatctcggctcactgcaagccccgcctcccgggttcacgccattctcctgcctcagcctcccgagtagctgggactacaggggcccgcaaccacgcccagctaattttttttatttttagtagagacggggtttcaccctgttagccaagatggtctcaatctcgatctcctgacctcgtgatccgcctgcctcggcctctcaaagtgctgagattacaggcgtaagccaccggacccagccgcaagatttccttttttaaggctgagtaatatgtctgtgtgtgtgtgtgtgtgtgtgtgtgtgtgtgtgtagcatctaggttgttttcacctattggctattgtgactaatgctgcaatgaacataggagtgtagatatctttacaaggtggtgatttcatctcctttgggtaaacacccagaagaaggattgccaggtcatatgatagttttacttttattttctttgggaacctccacactgttttgtataacagctgtaccaagctacattttttttttttttttttttttgagacagagtctcactctgtttcccaggctggactgcagttgtgtgatctcggctcactacaacctctgcctcccaggttccagtgattctcctgcctcagcctcctgagtagctgggattacaggcgcccaccaccatgcctggcttattttttgtatttttagtacagatggggtttcgtcatgttggccaggctggtctcgaactcctgaccttaggtgatctgcctgcctcaccctcccaaagtgctgggattacaggtgtgagccattgtgcccagcccaatctacatttctatcaacagtgtactggggttctcttttctccatactgtcgcaaacatctgtaatcttttgactttttgataatggttatccttatgggtatgagatgatatctcatagtggtattaatttgcatttacctgatgatgaatgatgttgagcgcctttatatgaggttatttatagaattgaagaaagattcctcattctgaaaaaaaaattcttctgataatgcaatttattcttggtgaactatgtggaattgacttttttcacttttttttttccatagaactctttcaacctatgggaggtagggacttctgccctccaagttttcatcgtgattccaaatgcactactgaagtggcattgctttctttgctattaaacatgggttttctgcttcttctagagagttcttttcctaatggaggtcagcaaactgcaaggcctagcaatgattgatcccagtcccatacagcattttacaaagccaaagtaacagcagcctgagccatggcacagtaaaagtggttttacatttccaatgcctgtcctaaagtagttttagaggtcagcattgatcaataaatcattctgatcacatgtatcctctctgggggcccattagctagtggtgatgacttagtcatctcaccatcagcttcattagtccagaagtcgctgggaccacaagttcaaatccctgttgagctgatgtagctcttggtcttcctgaagtagataaattgagcttcacatagtttgtcgtgcagagatttctatgatgcatcatctgctctccggtggcagtacaagatctatgacccctttttttaaaaggagacaatgcctgatcctaccctagtaacttctcttttcatctaactcaaataaggcagatatatggcttctgaaatgattagattcattaatttccttaaaatgccatgtcagggcaatgatgcccctttgccaataatcccatgcccttaactgtgtgaacattctgtgagggcttggtagagggaggctttcaaatccagttcttccaagactccagcagaggactggagtctggaaaaagtaaggaaggggaccgctggtaacccttttgaatgacagtaacaaaatgtctgtattttttctgtttgtgccttgtgactggtaagattatcaggatgagagtaacatcagcgtggcttatcttctttctgtagccaagagggctcacgatagagaaaaaggtgatctgcaggccaaggacattgtccacactgcctatttatgcttgtatactcatgcagtgttggaaaatgcagtgaaccgtgagttttagttgggtagggctttgtctgaaactggagtccaaaagtatcatgaagattcttatcattgagatgctcagggtcctgtaaaaactcctcaatagtcagtacctggttaatcctcctccaagagttcctgacaaatcaaccaagaggccaaattatcttccaggctgtgggtggataagtgaccccccagctagttgttagggactggctgtggcagttatttattttactgggctggaaaaaacctttctgtccccaaaggttcctgcttctcctcctggccactggagagagatacgaaggaaggctggtattaaagttctctacccgatccaaacctctcctccctcgtccctgtattaagaggtttcccatacctgttggcagacccccataaaaggtggcaaatgggcaaagcagtgaggggtgccagcccaagaagtctggtcttctccctgtggctggatcggctgagattcctaaggtcattcagtgatttgctgccagagtggaaatcactccctaggtcccctgactcggcatccagctctccatccattagatcgtgaagcctctcaccaccagcgagacacactcaggacactttaatttcagagtttgattctatgtctatttttcagctatttgctgcaacattctgggaaagtaaggtttaaatttcctacaatccaaatcattttctagtttacttataagtgattctgaaacagttggccctggaaagctgacaacttgataaaatgtatctttcaaatcaacctagtgctgcctttatatatagttaaatcatccaaatccagggtgccgagttaagaaacggagatcttctgttcccaggctgcctgtcactttgggtaagaaaacacacagagttatgctcgcttacgcttactcaagtgaggtctcttgggaaagaaataagcactggcttttggcaggtttatctgcttttagcctataagaaatggtttctgcggtgatgtgcgttggacaaaggtggtttggggagacttagtgtcaaaactagcagccagtataatgttgatggagaaaagattttatatatatatatattattatgaaggttggagggttgaagagcaatactgagcattcaacaccaatgatggcagtttctattgctttaaaaaaatagattgatctgtatttgaactgatgtggcatttattcatgacaacaagctgggattgatgtgacatgccttgcatctctctacaccgacccaggatctcagacatggtggcttttctgattttgctacacaatacgatcgcatcccaccctttgggggaaaaatggggtcgagagcatgaaaaaaatagggagtcatttcaaaacatctacatttatatccagagattctagatgtcaacagaagggttttgatgcctttttatttcagggtaaatcagtgaaatgaaatcattatcctcatactactattgtagttaacaattaattaaaagattaattaaaagaaatgaacagatacactgattaagctgatttttttatttcaacagcccagataaagtcgtggtgctacttattcagttttttcccttcatctctgtacgttgcttgtttttctaaagagtaggaatgtaaaaatcagtactgtagttgagtcccttaacatccaggccaaagagtgcagtaccatgagaagccttgcgggcaaaggggacgcacttggaaaaacagccgggttgctgggagggtgagagatcagatgggtacccttgccactggtgtaaacatggatgacagctaatttaataaactctgccacctataatgttcacaagtaagtggtagggacacataaacatcaatagtaactgttagaaatctggctgttcacagtgataattagctttaaaaatggaagatgatttagattttgagaaatactgttgtaaacacaatgaatagcatacattactcatagccttgttagccaaacatttcaaagtacaaacattaatctggttaagtcatttaaaatcaagttaaagggatgtgtttcctactttccccagtcattcccacactctgttgtctgtctccttggccaagtagctgtgctgggcatctaagacagtagctgcagcatgcgctttggagtaaggtagacctgggtttgcttcctgcttccactttgctttaggaccccggtatataagctctcttggccccagcgtgataatgcctgtataaggcatttatagaattaaatgagcaaatatacatatagctctttgcttagttactagcacagcaagtgctcccttaacagcactgttactgttatgtgctcatgtgtctgagcattatgtctaagttcattcacatctaagatccttaaaggcaaggcttatgccttggtcttctctatagtacttcccacattgctaatagttgatccgttttattgaaattaattggattagaaattgcaaccgcaggtagaaccactttctagggttgataaccctgaatgaaacatgaattcatgctcttcttttgtatataggctctgtgggtgagggtggggcctcctagccaagttgaaaaaaagatgacaactggggaagagaatatcactactgcaatgaatgtaccgatgactgccctggctcaaggcatagtaatctttccctttgtttactgtgaatctaggcagaaccccagcaaaatggagaaggtggctgtgtttctgtagtaatcccatggcccggaaatagtaaaatagttcaacatgtgctgttcaactgatactatgtgctgattcatgctttcaggttgtaggacagttggaaattgttcaagaggggtggacctgtggaataaaatgatcccggtacacaggttctcccctctcatccataaaagaaccacacctgaaagtgaaagttgagtagtgactttcctcaatgaccagtgtggtggaatgagggataaagcaatctcatatccaagcaggcaaaacaagatcagattaaagaaaaagcatttgggggttctgaaaggaactgatcaacttttaaaaagaaataattccaaacaaatatttctcttgctattactgagtttttttggggggtgggggttgggggggagttcagtcctaaagctttttttttcttagtaatgagatagagcaaccttatatgagaggaagaagatgaagagggtgagatggaaagggtattaaaaatctttttcactatagccaggatgccttgctttccaaacttgtgtgaaaattgtgaaaagtggttttatttttgggaaaagagggaggagcataagagaatgatttgttgaagaccaatctggaggagtataattcccatttagaaaaactcaacttgcaaatcataagctctgaagttgcaaatacctttgaaaaactttgctagcaaatctacatcaaatgtatcctgtagtatttgtcttaaaccaggttcatgtgtattgaaatgttttactctcaagacaactacatgttgtgtcagaggatgcataaataaaaggcaaacatccaattttataatttacattataattcagtggtcttaatttttgttccctaagctttctgaaaggaagatagacttgaaagagagaaatttatttttaaagtttatctgttattttagcatgaaagttttatctatatatttttatataaaatgtgtaaatagccatatggcaaacactattcaattagccacccatattaaacaatgtaatagtacctattgttgaagcccctgaggattccttcttgagaaaattccccttcctactcccaaaatgtaactcctatcctgaatttgatgggtcacattatttttcatattaaatagctgttagtttccaaaaaatacatattaaatacacattttggctgatagagacataatgacctaagaaaatgtctatatctctctctaaatgaccaggtaaaatccagattgtgagtttcttgcctaacacaggaatgtagcaccaacaatgaaggaatgtttatgctgtgtctaagattagtggattacagtatgatcgtaaacatgtattttacaaaagaccatattgactacagacccccattagatcatttaagttagctgaatgatcatgaaagaattgggcaagtgttcattgacttttgaggcttttccattattcagtagatattttgcaatttcacatgtttttttcccttttaaccctgtctctagtcttcatttcagctatgtagtttatgtcagtactgtgctttagattaattgagataatatataaaaagagtttaggaaactatacagcatgaaatgaatgctgttataattgctccattactgagaaagccagaaatttgagagatactgcttaaagggtaatgaaaaaaatctcagagtgggatttgcaaactaactttaatacatggaggacttccttctagatttttcgagttttatagctggatggaatcttctagacagtcattcatcttgtttatttaaagatacaaaattaaggtatagagaagttaaacgactcaaaagcatgcaagatcattcaggaagattcaagatgaaaaccagtgttcccaacccctcattcattgctcttcccttccctgcttacctcttcaggaaaaggaagctggggaggaatgtctagatttcaaccatgcaccacatacgtgcacaaaccttcacctagcatcaaagtaatgcttttgtgtcacttggcctggcaggactgaacagaatggttttcttcatggtcaaaactttaaggggagttttcttttgtttctactgcaaacaaaatagtctctcttttcctagtgccaccagatatgtctttagaacttctttgtatttattgtaatctgtgaatattgtgttttacagcctgtaaattagatatagaattgaataccgaggcagagcacaggctgttaaaatgttcaattccggtgggggaaccagtgagcagttaaggcctggtgcatataatgttaatattacattaagtactatgttattgcatgagatgcttattgttaatgtctgtggggaggatccgttccaaagatttcaatttcaataaacagattacgcagttccaccatacacaattagggaggtggtaatgaaatggttataaagtcccttgtggatctgtcatctttttttttaattttgtaaatatcatcagaagcattctagagggaagtgcttatgcatttatttattatcgattttttaaaaatacatttaacattactggttattgcaaatccagtctcagtgagttaaagaagataagctgtttctagattattaaatgctgagtgtatagggaattgtgaagtggcatccttcatataaatatattaaatattaataaacagtgattgtaaggaattaatttacagctacatttacttggcaaataaaaccgtattaaggttttgcccttttgttgcatgcaatgcatgttttaaagaaacccctttggctaatggtttggatgactgcaagtgattctgtcctacagctgaaatcatgcacaactgcagataatcaagtcgggttaaacatacattctttcaacaggcaacgaattgttggaggtgcaacttcaataaactgacaaagttttgagggatccctaaatggttaactgttattccttctggggcctataataaagcagtaaaaatgaatgctggatggttagtagccgaaatatctccttggagtaagatgtttaatatagcagacaaaaattcaggatgctagccgttcattcaggaaggcatgctacaggctgaagagcagggatctgaagcaggctgtctggattttattttttccaacttcagcaattcatgtaatttctctgcgctttagtttcttcatctgtaaaatgtggataactatgttccattcttcctagaatgttgtgattgagattaaaggaaacgtatatagtaagcacaaaacatagtatgttgctcatagtactcaataattattagtaattttttaaaagcattcgtcattcactcctgaattcagtaagtgattattaaatattctaattggcaggattgaggatacagtgttgaatcgcagtcctcaagtttcacagattttgcaaaatttctagacatgattgggaaatgccaaggaatttagatacagtattaggtttttcagagggacataaccaataggatatagagaaagatagacatatgtgggtgtatttattagggggcttggatcatatgattatggaggctgagaagtcccattatgggccatctgcaagcgggataaccaggaaggtcagtggcatcactctcggtctgaggctgaaggcctgagaactgggaaacagcatgtggaaatcccagagtccaaaggccagagaacctgaagttctcatatccaagggcaagagaagggtgttccaactccaggagaggaaattcgcctttcctctgtctttttgttctattcaggcccccaccaattggatggtgcccacccacattggatgaggatggatcttccttactcagttcgctgattgaaatgccgtcttttctggaaacaccctcacagacatccccagaaataatgctttaccagctatctgggtattccttaatctagccaagttgacatcaaaaaattaaccgttgcaggctgggtgcagtggctaacacctgtaatcccagcactttgggaggccaaggcaggcggatcacttgagctcaggagtttgagaccagccttgccaacatgatgaaaccccgtctatactaacaattaaaaaaaaaaaattagccaggtgtggtggtgcgtgcctgtaatcccagctactcaagaggctgaggcaggagaattgcttgaacctgggaggcggaggttgtagtgagccgagatggtgccacttcactccagcctaggtgacagagcaagattctgtctcaaaaaataaaaaataaaaaaaataaccatttcagatgccctcctccagtgtcacattattgtttttctataggattatgttcttgtctatgttctatgtcttatctttcattggcagtttataattacacaaagatatataaccgctttttctttctctgtttcttccccaatccattcttcaacgctcatccaagaagaggtattagacaaaagctcccctgcatctaagcaccgtggagcacctgaatatataattaacccagtcagaagttattgtccaaagacttacacttttatagctttgactaccacatttaatttctatgtagtctttttaaagtgttgaaacgtacacgcatttctgctgggtaaacacataagcatatctagctcaatccagataattattgcatacctactctgtgcaaagcacctcaggagaaaatgcatagaacatatattaaaatgggcattatactaggtactgtggtgggaagaggtaacaaaaagatgataatagatagtaacagaagggatgtaaagagggtaggaaggaaaagaaagaagggagggaagaagtaaataggcaaactgtgttcttgaaactatgaatttgtcaatgaaacagaagagaagaggaagaaaagaaaaaaaggagaagggaagtgaggccagagaagagaaaaatatctacctaaacccgtcagaaaggagaaggtagacttgtgactctcaaccagaaagacacgccttcccagaatctttggatggcatgggcaatttaaataagccaatcctgagattctgacataacatgagagggccgctatcttgattcagtgtctctgatggtgtggacagaagtggaattaccaagggagactgggaagtacgagttgaagaactatcagcaaacataggagaggacagcgtcccaagttgagagagggtttccgaaggaggctgtggccaatatggagcatatgtcatagagctcctagcacacagtgaacacttactgaatgctagttattaaaataatttactaattctgtatggagcatccagtagaggaagactgagaacagccaaatggattttataatttcagtaaaccagtggtggaaggcttatttcagagctctggtaggagcagtttacaagaagggtccctccagtccgtcttgtacttttccgtcccacagacactcttctggtttcttctactttaaggtctccaattagcctttctgattggagcctctgtcccagtccgcacctatgattctccttgttgccactcatctatgacaaacacctcagctatcaacaagagagggccattctgtgtgtcatgagacactgcttctttatttgtaactgatattcatctaaaactgacctcctgctttcctgcttctggacttttgctccagcctattctcatctcccttggtagaaaccctgcctctaccatcagccctatttaaaaatcagcctatttcatgaagactttgttgattaattctttgggattaacttgcctcaatattcttagcacttataatattatatcttgtatggtagttgtgaacttgtaaatctccttgctagatttaggactcttaaaggagtgcccacgtgttataatgtccagaggataatttttgtcagtgacttgctaagtgagagcattacctttttttgggtgcctctttcagtgccaaacacagtgttttgcacataatagttacctgttaaatagatgttgaattgagttcatggcagccgttgatatctttcattagccttttagttcatattttgtgcacagagtagtagtaaattctgatgaaagttctgggtcagactatcagaactgtgagagcccaggagaagccaatgcacaagggtaagtaccagagagatttcctgtttcttagttatctattctaatcatcacccactccaggcaccacctattcctaactacaatctcttgccttctctcttttctcctgtttgccttttctttcctctgctgagattcatcttcacaaatctttttatagggagatggtttaataccttccacttcatgtagtactttatcttttcagaaaaacatttacatgcatctcattgaaactgatacgctacttgagtcacttccgtctgcctgaagtatatttctttgttctaacttagtctcatttctgcaaaggtcagtagaattgtagtactagaatttagtatttctccagttttcaatcttccaaagacagctgtatgacagatatgttggtgtaggtattaaccctgccaggcagatccaggctggtatctttgttttatagatgagaaaataggagcccagagaggtcaagtgatttgctcaaggtagctgacttcggaacggcccatgtaaactgataaggcatctttcaaatcctcagaccaaagccatatgagtattgcttggctcatggctctattggtcagtgacaggcaccttgtctccccacaattttatgatacaaaagcggtactatgcaaatcagggaagaacatccggagacagaataatgaagaataagggaaaagaaaaatagattatgcaaaacaggaggtagactgccctgcatctgtttaagtacattttgccatgacatttagggaccaagaattgggtgtcttctcatgtgtcgtcatcttacgtggtatactggccatcttctccaatgtttatttcacctgcatggtagagtaacgctgtccttggatcagaaaataaggcacttgacccaccattcatcataacacgtgctttggatgtatttttctatttgtggggatgcctttctgctgatccatttataacctctcatggagtttccatggtgactaggaggcatttttataggacatgtggtcaggggctgtggataagactgtgtctgtagaacacagagagcctaagtgtatgtagcaggagagaaaaagaaacttgggaaatgaagccatgtgatagaaaaagagctccagagggaagataagaagtgtgcagataagacttagtgaggaatatttacagtagttaggatattttaatttgtattttaatttctaacaacagatgctctgtagaagagtggtacacgttcagtaagcaggcttggttgcaatgccaacttgagaaggtttaactggtagacctagttactctatgccaataaatacaacaaagttttacatcttccaaaacggtctatagtttcaacggaataggtcttaacttaaatttcattcacacagtgaggttttgttgtacctgaattttgctttttccacgatcagatagtctccatttagcaagtcagataaatctccatgatgcaagtttgatgtgagtccaatggagccatattccccaaagtgtgttccttggtggtccacttcaccagggtgctcataagtaacgtgccaaactatagttctgtggacaaagaagtttagtataaacaaagttaaacactctggctttctcagagccatgatgccattatgctggtaaatgtctaagtggggatagtactcagtatttcccagacattttaataaataaaacatttcttctactaccttagtatcattccgaaaactgagtaattacttgggtaaatgctgttatagagcctgggttttctaggcatctgtaacatggtttgtcatatcattctagggacgactggggcatgaacaaagttagaaccttttagctgtgtgtctctactattaccccacactctggagaatctctatcattcatagaagcaccttgttttgctttctgatgtctggctttaactcataccagtatgaatttaacccctttctcttaatcaaagacaattttaaatgcaatgtgtcaaagagtatatgatcagctagaatctgacagagaatatcaagccctgatctacctaaggaagttttgtggacaattaattagataatttctaaaaatcaagaaatcatatctcccaagaatcatatctaacccattagtattgactcagaaaatctgctttaattctcatgtttgaatctctagtggagctaagaagctgtctattgtagctatgaaaattgtggagaagtttctggaagtagtttcatggaaggagtaacacagagaacacggcattatcaagcattatctgtagtgggaagtgttctggatggagattcagagacttgggggcctactccctgctttgacacttatgaggtgattttgaccaaatcccttaaaacctcttttgggacagcacatttggcatcctgtggatctgtctcttgcgtcaatagtgtttggacagaacagatccagagactctctattaaaataaaaaataaataaacctctcttggtttcagtttcatctttaaaatttaacggttaaagcaatttcactactggatatatttccaaaggaaatgaaatcagtatgttgaagagatgtctgcactcccatgttcattgtagcactatttacaatagatcagaaatggaaacaactaggtgtccatcagtggatgaatggataaagaaaatgtggtacagatacacaacggaatactattcagccttaaaaaagcaggaaatcttgtcatttgtaacagcatgcatgaaccagagggacaatatgttaaaagaaataagccaggtgcaggttaccagaggctgggagagggatgaagtccggggagaaggggagatgttgttcaaaggatacaaaattccagttaggcaggagaagtaagttcaagagatctactataaatcatggtgaccatagttaataatgatgcattgtatacttgaaaattgctaagagggtaaatttttaagagctcttaccacaaaaaagttaactataatgtgtacattcattatcttgaattagccattccgcaatgtatacatatttcaaaacatgttgtatatatttatgatatcataaattttatttgtcaattaaaaaataaataatagtaagtttcaaacatagcagttaaaccatcgattttttttttaccgtcttttccttcctacatccatgcttttcaaatgaaatcatttctataaagtagataaaagcactccatagagtcctgctggaaggtcacagggagggacagggtggcagggtaggtggaactctgagcccacttccatcccagagttccacctactctgccaccctgtccctccctgtgaccttccagcaggactctatggagcagggtaggaacccattgttctggaaggtccccattagcaataaggctctgggtgtgctaagtcacaatttgtgctgggtgcagtgtcatatgggaagggatgctgtggaagcatttgccatccagagctgctggtggtccttagggtgtgcactgaagcagggtggagttcacaaaaagagctgtggccagcatgggggaagccagggacagagcatgctggcctcacacatgtgagcgaaggaaaggaatgaagatgagaaggagaagctaaagtctaatactcctgtagttaaaggtgaatatctgctaagaattttgtgtctgaaagttatttctttacggcaggctttacaaggagatgctgatcctctccagtaagccagataagtcttctttaccctcattcactccattcccaagtctgcattaggtacattagatatggtcccacttttcctattcattaatattagcatggtgccacccattatttttatttctttgaagtcatccttggcctatttatttaaattatgcaaagggtttgtatttcctaagattacaactccactaggatcaatgattatgtcatgcttccccggggattacagcctgccctgactggcggcgcactcagtgttttcataggacttttccatcctggtgataatctaatgcccttgattaaaaggcaactacactccccccagcccctcataaagtggtgtctcaggtgagactaacccctccttcatctgttaacccttttaagccaggctgtggctacccaacgttgcttactctttgtcctcagtctcaactgaagaccatgaatttatttccactaaaatttgaaacgttgaaactagaccaactatgaaattaattgtctaagacagtgatgccttacatgagtccctggacccctagagattctgaagccaatagtggcagtttcgttaactatttttattgtttcaaaagtcgtcaaataagaatttactcatgataaacaattaacagatcaaatttctttcattaggctgaagttatattatttttgtggcttaataggctgatctgtaaccctgaaggatagtcatatatgtttcgataaattaaaaatgagatcagaatattatcacctttaaagaagttcagtttatttgacataaaagttttccaagatcaagatgcttaagataaaagagtagtcaagctcttgatggaggaaaaaacctggcaacttaagaaaaagaagaggggggaaacaggagagttttctaaatagaggatcaaggtgaataaaaatccagaggcaaaaagtaataattagccaataaatacaatacaaattaggaactgaccagccacacatgagtaaaactttctcagtcccaaactttccaaatccatgtagtacattgcagctcctaggtgatcattcttgctttgtagtaagcaaaccacatccttcggagaaccttttccattcattccttctccctactctaggatgtttaacatcatccctgtcattgcacctcactactcagcagcacaaatacctgttcatgttcatcttatccaccagactgtatcctatgtcttgacattttctgtgtccagcataatgtccaacacaaacaagatatttcaccaatagtggttgaattaataaataaatgaatgagtcttgctgccaaaacctaagacattttatcacttttaggtctggtttttcaaacaaggattccacagacagtgtggaaaacttggttggttccacaattaaaaataactttggaaaatgctatatcctataattccttctcatattcacagtccattttacatattaacgggagttagactttctctccaagttcaatttggcttgacctctagtatctcccaaccttatttgatcacgtaaactttcttcgcctgctgaattatggataccagagaagtaatgttctctaagacactgattgggaaacagttctttggagaaggagggtgtgtttaggaagaggtacaatgggcatcattttgacaaagcccaagtgtcagcctgactgttatctgtgaaagccggagcctgtcactagcccttaggaaagtcacacttccaagggactgagggcttgtccctacctctctaacccctggggctctctggagcttttttgttaccactgtgatccttgtttatcctgtttaccttaatggatcctgtccaactgctgagcctacctgtggaaggtagtgctggaatgttcacctcgccctagtaaggcagaaagcctctttccaagcaggtgcacttcttgggggataaaagacacatttcatgaccagtagtgtcccaaatttgagtggggttttcccgtagactaatgttagctctgtaagttttctatatggaaatagacaaactacattttgggaaatttttgtgggtttggctattaactcatttcaaaataatacatattctttgtagcatattcaaataatatagacatctttcctcacacctcacaccccattctccagcaaacatttagaatagtttgatttaaattctttagtactttgtgtatatccaaacaaacttcatatgcataaagacagacagataatatgttgtatatataatatctataaggtatattatataaacatatatacctacactcatatgtatatgaatataattttatttggctaaaaaacatacttgtcttatgcatgttattaaaaacttttcttttgtactgcataaaacatcattaatatctgcctatagcagtgctcactgtttaacagccacatagtatcctacatagtactagtatcctagtatcccatgttagcaattactcataatttacttagttttctattgattaatttacctttgggtcatttgtaaaatatttacaaatattaatttacctgtacaatatttctatgaacattgtatggatatctttgcgtcagtgtgactattactaccagaaggtcatccagaaatggaattcctgggtatcatgcatgaaaatctttcacttaagtcggtactacaaactttcccttccccatgactgtagcattttatacacttctttaattactagtgatattaaatatctttttctttattagctacttgtatttcttttacaaattgtttattcatatcttttaccaattttttgttaggttatctttgtattgttggtgtataggcaatgttatattttatgaatattaatgctctaaatattatatatatagatatattttataccaattcttcattgtcttcaaagttcatttgtgcctcagataagttacatattttatacagtcacatatgttatacttatttttggcttttaggttttggcttttgtgttatgttaagtaaggccttttctaattcaggcctgtaaaactattgccatatttttttgatactttctcaaatttattatttttaaaaatagatatttaatccagctggaatttatttttttgtgtctggcatatctaagaattttcaaattgagaaggataccacagaaaacatatctacaatggtaatacaatttattagatcttataagagattttttttgtcttggaaaaaacaaaattaggaattttgaccaagcatcaataatagcctatttttatttctcgagagccttcagatgacaaaatgcgctttgtatttgtgtagcaccttaaaattgtccgaacatttttgtatctgggttctctatttgcagcatcatgacaaccatatgaggtacatggagcagggagtattatctgttttaaatgacttgtctaaggtctctaattaatggctgtgttgattctggaaaacagctctgtttacattccagtattctttctactaatgtaacaatcataacctttctaccaggcgttattccacatgcagagaaatcccagggcagaaagtcttgactgtaatcaaagtgagaggcttaaataagttaagcaatacagatttgttaaaatcattggtcacgagccctttctccccacctctggcctgacgtaatggttgtgactgagttggaagcctgctggaaagagtctggggtggttgtccgatacaggcttaactggagtggtgcaaattgtgccagtataattcctaatacaagacagtggaaaattgctagcacaattgagagttgttaacacaatagaaaggacgctaaagaaaaacctgatgtgtctctcctgcatgtttttttgtccccactgccattttctgaggggataaaatgagatgacattgggaagaaaactaccacaccagagccggcagtgattgctgctttgaatgctgtacagctgcgcccatgtggccagattgatccatttcaaagcaatggtcattagattgcgttttactctgaaaatgcagtgcctttctgtttcccaagttgactgttatgatggatggtgggatgccctacctcagtacattattttatgtttaacaatcttgcattgtggaattaactgagttgtacattttgatagtattctatgacaaattctggactatgaagagaatgtgaattatggaagatgaactttgtacagtaggaaagttttattttgttcaaacaactgtactttagatctgattagatccagcatctaactttaacacctttattttaatgcctgctgatttttagtcacagaagaaaattcttattcttttaaaaagttgacttgaaactccctttaatttctctcctttactacttcactattttaaagccattatgctttgagaatgaaagtctttgggagaagaactgttaggcttgttaagcctgtgcgtgaactgcaacacgcccataaagtgtctgggcccctccaaaacaacaaaaaccaacaaccaacaacaaaaacctgttcaaagggaatagagttaacctgtacacactcattgcagtgaataaaattcatcaagtcatacaatgtttaaaactctcaattgtaaaaatgtaatttctgcattctttttgggcctaacgtagacacatgatcagacttgaactaaatatacctagaacattcactgtcagattgtgattaaatacacctggaacttccactacaccatttgaaaactgatctgtagtagcccatagaacaatgtccaggatggtacaacaattattggttgaatgattggataaattaataaaataagggttagtactcaggataaaatatttatactttttataataaaattatttttcataatgttatgtcacattatgaaattataatgtgatttataatcacatttgtgattataaaattgaattcaaaggtaaggctgggcgcggtggctcatgcctgtaatcccagcactttgggaggccaagatgggcggatcacttgaggtcaggagttcgagaccagcctggccaacatggcgaaaccctgtttctactagccgggcgttgtggcaggcacctgtaatcccagctactcaggaagctgagaagggagaatcgcttgaacctgggaggtggaggttgcagtgaatcgagaccttgccactgcactccagcctgggcaacagagcgagattctgtctcaaaaaataataataataaaaaaaattgtattcgttgtttttgtttagtctttacatatttctattgcttactatactttcttaactttgcagattggagagttagattggtaaaaacacatattcttacattttgtcttttttaaagagaaaaaggaagtaaaaagttagaaaatacccagaatcctttgcaaactacatgctgtatattggttgcaataataattttattaaaaccatcaggtctaggtctgtagatgaattcatatggctaggacaactaaaaatttcccaatttcccaactttgaacaacataaccatgcagtattgcaatatcattatatatatttaatcataaactaggaacaatagagatataatagatgaaggcttacctaatcctcatttaactaatcaaagaagctgcataatcctataaaattattaaccatttaaaatgacttttaagcaactctggaacaaaaatcagaattaattttatagtacagtggtaaattatagttaataataatttattatatatttcaaagtagctaaaggagaagaattgtagtgttcccaacgcaaagaaaagataaatgtttgaggcgacaggtatcccaattaccctgatgtgatcattacacattgtatacatgtatcaaaatatcacatgtggccgttctgcctatgaagtagccattcttttattcctttactttcttaataaacttgctttcactttacaaaaaaaaatcacatgtaacccaataatatgtacaactatatcaataaaaaataaataacaatttttaaagaattagaatttaaatgtagttcacatatatctttttttttttttttttttttttttactttaagttctgggatacatgtgcagaacgtgcaggtttgttacataggcatacatatgccatggtggtttgctgcacctataaacccatcatctaggttttaagccctgcatgcattaggtatttgtcctaatgttctccctcccctttaccccatcccccaacaggccctggtgtatgatgttcccgtccctgtgtccataagttcacatatatcttatgtgtattttataatatatatttatcctgtaagttctgctataaaatactgctgcaagttctgctataaaattattaattagaaattaaacaattttccttagtcaaaatgttttagtagttatacttaaaggtggaatatccaatttttaagtgtcagagctccttttaatcagggaaacaatctgtaaatgataagatgtctcttatttagatttagatttttcttagacattgttagcaagcatctctcagtattgtctatcttcccaaaatattgagtcaaaaagagagaaacagaagtggttggattaaaaagaaaaaaagatgttcacctataaaacaaaaataatccctcaactggttaatggccatccctgatagacttgtgcaagaaatccaaatttcggagcatttagccataggacacccatcattgctccttttcctgcagtctcaggtaggaagggatgctacagtgtcctttgccctgtgtagacagcagcaccatccactcaatctgctctttgaaaatcacttcggtctcgtaacacatctaagtgttaaaaaacttttcaagtcaagagagacttctgtatatttaacttacatctttcatgctcaacagtttcatgactgttaaggagtagggccatcaggcaatttttgtgaattgcttttttgtttatttgttcttattggagtgggggaggagaacagagagtctgcaaaatgaaaagtggttcactttgccaaagcatcatttttacaaaaggaacacttgctccttttagagaaatcagaaaagtgtaaaaagatttgtcttttaaaatcatctcaaacctcatcttccccaagagatagtcattactaatatttgatgtactgtcttccagtttttctttgcacatttgtgttcacatatttaagataatattatatatttaacattagatcacatacattttttagtatcgttgtaaactctttagtctttttaacattttacttaacattccagctcacttatatcccataatttacataaccatttcctcctatgagtcactgaggctgttgcatcatccaggtaacatcattttggacctgaacttctacagagtaattccttggtcacatagtggcttattctataggatttattgaattaccctatagaacttaacatagtgaaggtgattcttcactagaatcttgttattttcaagacatctgtaacccaggaattgtaggaaaattatacttgagattactacccaccccacccccaccttcatgttttagaaaattgaagacagaaattatcagaattatcagaggcctgactcttcaggtccccctcctttttttttttttgaggcaaagattcatgctgttgcccagactgaagtgcagtggtgtgaccttgactcactgcaacctcgacctccccggctcaagtgatcttcccaccttagtttcccaagtagctgggactacaggcacctgccaccatgcctggctaatttttgtattatttgtagagacggggtttctccatgttgcccaggctggtcttgaactcctgggctcaaatgatccacccgcctcggcctcccaaagtgctgtgccattacaggcgtgtgccatcgtgcctggcctccaggtccctttttttttaatactttagagaagtactgtccaatagaaatatgatgtgaaccacaaatgcaaccctcagatgttacttttaaatgttctagtagccatatgtaaaaagtaaaagaggaaactaattttaataatgagctgaatgcaatatacccaaaagattatcatttcaatctgcaatgatataaaaattactaatgagatatcttataaatcttcttgtgttagaaatggacctacgcattctatatttaacacatatctgttttcagtctagctacattttaaggctcagtagctgtatgtagctagctgctgctactacttgggatagcacagctgtagagagctagcttaagcggtagataaggtggattccatctggagtttcaactagctctgtgcttattagctaacctcaggcaagttacttaacttttctatgcttcagtttgtctgtctgtaaaacaggaatagtcatagtaactattgggtagagttgctgtagagtttgatgagataatccacggagacagtgctcaataaaagtcctgtaaagaaatgttgaaaaagtgtagctagtgatcctactctaacttaaccaatgactttcagcatcctatcatcttcccctttcatcttgtcactgtttttggtaagaatgaattatttggaagctaatcactgctctcatgctctggagaaagggactaacatttcacccatagcctagatgcccaaagcaatgtggaatcacgtacctctttgtaatgtttaatctatgttgatgacagggcttctccagggctccttttggtcctcctctaatagaggcctacactatttcctcctggcctgtcagacaatatgttctgatctcttccaagtggtggatgggaatgtagagggaaccacaggttcttagcatggctacatactctgtggctgtcatggtagtttgcaagggttacttagtggaaatttagggctattctacctgtcttctcaacttctaatattccagcctcagcatggagctgaaacagaaataactgaaaagagagtttggcagagatttctgagccagaaaacttgcttctcatgctgatccaggtgtatgtgcctcagtggttctgccataggatgggaaagatctaccaagtgggggtgtgatggagaaggctcccttcagttcaccctggaggtgggttggatttctttaagcaggaagacaccggctggaatcccaagtcctttgtacttagaaaatgtgaccaaatctcacagataatgctgtatgaaaggcaaatgctcttgctgaccaacaggcaggctgtcttcaggcacatcacagttagaaaacacacctggaaccttttgttgaattcttgttggttgccacttctctgtattgacttttgtgtcctgatcattgagtgttagtgcacaatatttttatattgtgggtgtgatcaggactgttcttaagggtgactataattagagaacagccatctatacctgattttcattgtattcatatattactgtgatctctttattttcatttagtgctgaaaacacctgcaaacttatctgcagtcacgtgtgtcttttcctcctgttccaagaggtatcctatcacggccaaagcccttaatcccattcctgcccacctcctccttccttcaccccatggcttgtcccctctctcctcagtcttcacctgatcactcacctgatctcctcagtcccctctctcctcagtcttcacctgatcacttggctccttcacatctgttcttacaaccactcaagtcctttctgtcttcctggaccccacatcctctccagttgcctgatctctctcttctctgtcatagcctgatacttgcaagaactggtctcacttgtgacatccctgccctgacccccatgtactcctcaagcccctgtgatctggattccacccaccatcacaatggcactgttctccccaggtcagccatgtgctccttgtactctttatttctcttctcctgtgacctctctccagtgtttgatgctgttgtctattccctccatcatcaaattactttttccctttggttatggtgccacactatcagtgtatgtgtatgtgtgtgtgtgtgttcacctacctctttggtttactaggttctcctcctctatccatcccttgaatgggtgcccttttctgtcctctatttttcttataccttcactcctttggctttaatgatattaaacactgataactccactccatactttaactccaagtctttcttctgacttccaacccatacttccagctttctactagacactttcattcagacatcccagtaggcacctcaaactaagcatgtccaaaatttcgtgcatcagtatagggtgaccatatattttattgtccaaactaggtcaacttttgagtgtgaaaaagaggtactactagtaattatgccacaacaataggcatagacagatactgttccaggaaaatcaagacaggtgtctagggcctacttgtcccttaggcacagcaagcacagtgcccaggccatggttatgatacttttaggggcccctgaaaacattttaattttgtttaaaatcagaagaaaaattaatatactgctaataaagtaataatgaacccagctctgtctttatatcaatgcagtcataaagtataattttgaatttttttaatgaagaaaggggcccacaaaggccagtgtgccagagaaaccatgaaaatcatcatgtggcctcatgtatggccacccttaacacccacttctccagatgtgcttcctttcttgatttatctcgcagactagcatcctcacattcactcagaagaccccactccagaaacctggatatcatccttgagtcccctccacccatcccttcagcacccactccactgagcagaaggattacctgtgactcaacagttccctaagcttctccttccatctaggaagactggcccatggctgcctttatcttaggtcaatcagcaaatcaaagaagcagactttggccaaatgttttctcatttttctttttgttttcttccttcagtgtattccctcttcttcctttgtaactttcaagtgcttttattggccagcaacaaagtgcttaactccgccaaataaccacccctggcctgcaggctcttctccatgcaggacccagtctcctctaccacctgctgtgaatttgttcttgggctgtgaggagcatctctcagcatttcaagattcaggtgatggtgcttctctctttgtcagagagaatgagcatgacttaactggcaaagcagcctcatgtttttctacattatccttaatgcttaaattcgaggaaaaattgctctgtaaggaatgttaattttatctttaatgctacaaataatgagaatgagaattctgtacagtgcctagacattgcctgcgtggatggttactcaatgccctcatgaagccccctctgctctcacatttcatctgatgaattcccatttgctccacaggttggaccaatgaggcaacactaggggagaagcgtgtcttttccagaaagatagggagagccttttcctttccaaaatatgcttcctggatcatcgctgctctactgatcataacttttacatcatggccttcaaatgttgttttattcacaaatgagtatagaaccaaagaaaggtcaaaaagaaaatgcatgcatacaaacacataccccatatcttgtgttagcaagaaataacacattttccaaattcctgaatgttgaagttttccaaataccgtgaaaacatcatgctagaagagtccataacattaagcatgagaaataaatcacagtagccttagtctgttaaaaactagaaacaagttgatgcctaccaaaataaaagttaaggggcataatgaaaccattggaaggaatggaccttatttagaaacttgcccatagaaagtcacagaattcctttgcagccgcatctcatgacttactcttcaaccagcctattccttctatgctatggctcactcagtttaaaatcttttttccactcttcaaacacaatgcatagttaactgcattttcttataaaatagtttatttttagaatgaaaatcaggtcactataggaggatccacatgcaaaacccagtgtccatcattcaatgtatttgtccctaggacactggccttttgtccactccccttgcctccaccctccttttaatgattcagaagctacaagaatttccttgggacttcctgagttctgccttcacacagagttcagggcagggatggaaaatctctttcaacctccgtgccaaccgtgatcaagtgggggcacctgtgttagaggaattctgatggggcatcaggattcactcccagtgtctgccattggccatatgggggagtggaagctcaaacgcactaaattgccatctctgggataagaacacctggatgagacaatccaaggattgggaaagaagcgaaagaaaaatgccttctgagatgtaaagtttaaaatcaacactatttgtgttgcatttcatctacattgcctcctggcttaatctgaagctggtagtgtccttctaagcacttcacacggaaggggctggcatggcctgtgaacttggcctgaaaggtcctatagttctgaatgagcttggactcagagagactgatgccaccaaatatgaaattcccagtttttctaagatttgtaacattctcaagttaggaggtgtctcataatcagttctacttttgatacagcattttaatatgagaagttattatattgatgctacattttaaaattaatgatttccctgaataggaaaagcccaataggtactctactcctcttgctataaattcacaagcataagtttataactgtaacttgtattccatataattatatctgtatcagtcttttttaagctttaaaactttcttcagccaggcgtggtggatcacgcctgtaatcatagcactttgggaggccgaggtgggtggatcacaaggtcaggagttgaagaccagcctggccaagacggtgaaccaccgtctctactaaaaatacaaaaattagccaggcccagtgacaggcacctgtaatcccagctactcgggaggctgaggcaggagaattgcttgaactcaggtggcagaggttgcagtgagctgagatcatgccgctgcactccagcctgggcaacagagtgagactccatcaaaaacaaaaaaaacaaaaactttcttcagatataaacattttactattccccatttttatatgcctcaatcttccctgaatatcccacaagagtttctcttctatatgcccctattgaatatagaaagtattcattgagttttacattctataatttgattataaaagtagtctttattttctaagtattataacattttataagtataatacaaattatattaagagtaataacattaaatatgcttttaaaactacccatgcagaaactctctcaattgggaaggatagcctacccggagaggctgtattatttttaaatttaatttaacaacttgtcattttggtgtctacaaaccttgtgatcttcataaagttgagtcttttcatgaaaaatatctccaccctatgaaccaagagaatcatagtaatcaagttcagagacagcaaagccaaaaaacagatcttggatgatggtggcctcataaaaaacaggagcactgagaaggctgcctggctctcgtgtcctctgttgactgccagtttaccttctacttgttggctctgatggaagaaggctagtccttttccagatagttccatcccatcagggcattcctttctgtacctgaggcaagctgatcaagtgtttgtttgggtacagggcattctcagctgtgttttattaggtgaataaaagctgcttttttcctcattaaagggatgagacgtgacggtttttttaatcagctataggttctgctctggagctcttctggaagcctgtgtttcaaggatgctggcctccagatacctggagtttagattccataaagataacatgattgtattccaccttattatagcattatcagtcagtgaagaaaatttaaagtcactgctactatatcaagacgattgtcttaagtgccgtggaatgatcccaaaagaccagagaggatgctccttcattcttccggtgaggtggaacagcataatccttaagaatgtgcatgttggtgccacactgcctgggttcaaatccaattctgcgacttttagtggcttaggcaaagttactttacctcccagggccttgcttttgttgtttgtaacatgcaggttgtagtggtatcctcctctctcctagctagggttgctgtgggggttaactgggttagaatacgtcaagcatttagaagagtctggcacttgctaagcccaattgaatctttgctattattatgcatgggactgagaccgcacgcgcgcacatgcgcgcacacacacacacacacgcacacagtctacagaactgatctttgatacacatagaaaccacctggggatcttaaaatgcagatcttgatccactggatctggggtggtctgaggctctgcagttgccgccggctcatagaccatgctttgagtaggagagatggagagcagatgtgtttacagaaaatattagcaagagtgacaaatcaatgtggctctggttataatcactccttgtctactggaaagttcccagagctggtggggagctgggaggatgaggttctggccctgactagctgcacgttatatcacttaaggcccaccacttaagcacgttgtatttcatttctcccatcttccaaatggggataataatacttgctctacctacttcatgggattgttgtaagggtcaaatgagaaaatgtatgtgaaagctctttgaaaaattaaaagtgctgcccaatagaaaagggatcaatagtagcagaaggaggggtggactgggggacatttgactgggagtggagagctccccagaagagtaaattctgagctgaggtttgaaggaggctggagaggcaaattggctgttattccaatgtagcagtaactgctaatggaggaaacagcacagagacagaagcaaatacgcccaggtgtgtatccatgcattcagagagccaaagcaaactagcatgctttctcagcggagggtctattccgaagatttaatgagatattagattttttttaagtagccagagaaaaagagcataaaagggaaggtagaacattctatctgaaatctcaatcgaagctttttgagtggatgcaaagacaatagaggaattattttacacagtattttcaatgccactcaatcagcaaatgtgtcccccaccacttcttgggcacacagcacagaagaagcctcccaacacctggccactaattactgcctccaccaggctttgatgctcccagggattagcttgtgtctgtgccaaagacttcattccaaaattgtatgggaaactccagcctcgtgtctccgctattcccagtcatttgcctttttgggtcatggctggcttcatggctgtgtgattcatgcaggcgcttaggaccccaagctcagacgggctctgtgtttagttcaatgctctgctgtcactgtcctgaaatgcttgatatttttgaacaagggacccagcacatttgtttttgcactgggccccattactggcttcagtttccctcttctccctaccagctgcccactgctgaccctcctgccaaccttttccctttgccttccagagcacctttccataagaacccctcccacccatggttctcattgactaagcatcagtgtcaactaaggcactttaaataatactaacgtctaagtcctaccccagacaattagagcagaattgctggggctgtgtatttctgtgatgatgtgcatgtgattctaatgtgcccccattcagggtagagaaaaacagtcctgtttgcagaaagcatcttctcttcctggctttaagcaaaactttgctgttctctgtgaacatggctctctgcagttctttcaggaagagactgttcactcgtgtccaccctacacatgatggcatcagaaggaggttgggattgtcacatcccccagatgccactaacacaccataactcctccactgtggtcctttgagaaccttgctcctctctgatatgccgcatctcttgcctcatttctgtcactgaaggcaatgttctttggccacctcaactctggcggccttcaccttctctgtggatacgtactctcatttctaactctgttattacccagcactctttactccagagaccatatgtggagcctaggcttattctgcatcatctctcagtgctatctttgttcctaccatatctattctcccaccccaaataaaggaacattcacttgctttggcgaatagggaacagatatatcttttgggaggcaatcattcaactcattacacaacttgcgcaactttgcagattggagccacagaaaatccatggtctccaacctcttcaactatcctgttacttgctcacaaagagctcctgttccaactcctttcaatgactgtctaaaacgtcacaaccacccctctccaactcaagccatccccacctctctcacagcagatgagctggtgtccttcattccttagaaaattaaagtcattaggttgcttttccatcacctccctccatccacactcattctcttctcttccagccccaaagatgatgtttccttcctcttgttcaaaaccaacttatcatgtgagctctcagttcatttcccacctctttcagaagcttattccatcaggaacttcttacatatatttttaacctttctctcttaactacctcctcagattacaatctctactccttaaaaaagaaaacagaaacaaaaacaaaatattatactccatattatccttttctgctttataaatcagaagatttcaatttttttacttcatcttaaagcacataagatgtttcacattgcttataatattgacattgtaaatgtcacattttaaataatacgaatgacacattgcaaataacatttatccttaatatgtgctaagcactcagttatttctgattttattccacttcattctattatatattttactattctatgttttgtaaatgctggttgccactcacaaaccttttttcacattcctcaaatggactacaacctatagtttgaaaatcattgatctaacctgttttgcctgtttaaacacattgtatacatgtcttcacttcctatgcatctcagccctcactgaaatgcagtctcaattctcattattccaatggaactgcccatgctagggcttattcatacaaataatattttaagtacttagtacttgttaacatattaacaaatctagtaggcatctttctcttcttttctcgatccctttaaagcatttgggatgaccagctgcactgtcctcttgcaaaatctgtgtactgttaactctctggattcttatctcacctaattgaatgtttctcctcggtttaactcctgggctcttttctgctgcaattgtaaaccattgtattccccagaattgcatccttaagtcattgttttctaacccagtcttcctgagagctcatccattctgtggttgaagtatcacctgtttgttgattgtccctgagtctgtgtctctttcttgagcatcttgtggtatcaacatcaccatcagagtccgataggcactttacacttagtatgcccaaacctgaaatttttattccagcaaaaatgcagcaaggaaaatcatgttttctgggaaccttgcttggcaacaattgacatatcctttagactaggtgtccccaactcccaagctgcagactgggaccagttcatggcctgttagaaactgggctgcacagcaggaggtgagaggcaggcaagtgagcattactgcttgagctccacctcctgtcagatcagcagctgcattagattctcataggagcatgaaccctattgtgaactgtgcatgcgagggatctaggctgtgcactccttatgagaatctaatgcctgatgatctgaggtgggagagtgtcatcccgaaaccatcccccacctgctgtattagtctgttctcacactgctataaataactacctgatactgggtaatttgtaaagaaaagaggtttaattgactcacagttccacagactacaaaggaagcatggctgcggaggcctcaggaaacttacaatggtggcaggaggcaaaaggagagcagacagttcttatgtaacaggagaaggaggaagagagagagaagggggaggtgctacacacttttataaacaacaagatctcttgagaactcactcaccattacaagaatagcaagggggaaacctgcccccatgatccaatcacctcccaccaggtccctcttccacattggggattataactggacatgagatttgggcagggacacagacactaaccagatcaccaccctctttggtctgtggaaaaattgtcttccacaaaactggtccctggtagcaaaaagtttgggaactgctgctctagaccaataattctcacatttcttagccctaataatgccaagagttcatacaaaccacctttttctatagcttccattgacaaagagtgaattttaagtttatgcaactattcgttatccacaataacaaatataattcctcatcattataacacaaaacacactatgcaaatctagattattatatcatgctccaagccaaagtacaaacattttcatatttccaacataaaatccactcagagtccaacattccaaccacctgattaaggtccgtaagtccaggctgacacctgcattccccattaagtcttgcaaatgccagggtcctcccttcctaagaggcccagttctgttttgatagatactaaagaggggcaaattcatgtgtttagtctatgggaaaggacaagctggtccatgcaaataggccaataaattatggatttatttgcacagcaatagaatcatcataaagattacagtgacccaatctgttaatttttctttttctctattttggttatctttcccccttcaggtgcagaaaaaattgaatcagtgccaatttgtttaattggatttttaaaataaccacaaaaaatatcaagtagtccttttaagctttttgagtgagctcaacaagggccaaatcaattaagcaaattgctttaaaaaataatctactaactccaaacaaacctcttccctatttcagaggtggtatatgcctaaatttacgcccagcacatttttccagctgaattaccagcttctcaacactagggatttaaaagggaaatgctgacacagtctcagccctggtagcaaaatggtgcagctttaatccagcagggctctttggacagcaactgtgcggcaaggcaacagtttgctgaagcttactaagcccgtggctgtcacctgatttgtttgtggcttgggtggggcactcatgctcaaaatatctgcactctgacttacaagacatttttctctcctctttggttttcttacataaatatatgtgaaatatgaaacacaccaaatgggtgggagatttaatggttttctttttccctttgtctgccacctccaccctcacctacagtttaataaacagtagcataagagctgtattttcttttgagcagtaatatgtaaccagaacaaacagaggacataggaaaggtggaaaaaagttagatatacaagcaagaaaaagtgagttattgattttattgactggtctgttaacttctgacattgcaatgaagtcttatttatttgtatacggaagactcaattacatagatacatatcattttaacaactgggttatttacaggagaattgcagcttcataaataatatagacctggaatttttcaagctgatgtttatccattgttacctaaagaagttatgatggctgcaagtacacttcagtgtaaagtcattagaacagcattacaataggatgggtggcgggatgggggaggggggtgaaggacaatagtgtactaaggacaagaatgctcagtccagtgacgatatacagcaaatactcctgggctaatcagatccaggacagcgccactggattgtcctccctcccaccataacatgacaaccaggaaaattgtcaatggagacagttgggttcaagcaaccaggtttttaaacttctgttttaactgtttttacaaaccctgaaatataatgctaatgacttaaaaccgaagtttatgaaggatatgtctaaaaacaaagcctacgtctcaaagaaggttttataaaaatagaaccaggtattcccaaatatcttctcttgatggggcaactggtagacatgtaggggaatattctagtgctgccctgcgttccctggaatttcctagatcctctttcaggtgatctcctgaaataattccttgtttaaccattagtttaatggtagcttcattgccaggttgtaggccccagaggctcagggagcatatctggccatcattcagtaaatatttttgggaattagtaaattaattaagtaatgagaagtatgacaacttggtatacatatatatatgtatatgtatatgtatatgtatatgtatatgtatatgtatatgtatgtgtatatatgtatatatgtatatgtatatatttatatgtatatgtatatatatgtatatgtatatgtatatttgagatggagttttgctctgttgcccagggtggagtgcagcagcacgatcttggctcactgcaatctccgcctcccaggttcaagggattctcccacctcagcctcctgagtagctgggattacaggcactcactaccacgcgtggctggtatattttttatgtatccctagcatgttgcaaaatacgttccacctggcaagaacttaataaatatcatgttgaatgaacaaatgaacaaatttcagatgatgactatgactagagctcatagtcagtagtgaacttggaactcagaccagggtcttagaactgggaatccccaagcatagctctcctgcggggcaaggactgagagctactgggaatggagtgcaggtagataaatgacagctgcaagaaaataccagcagaatccagcctgggctctgagcaagcgtttgctacttggttaagcatgcaggctgtcactacctccctggtggctgtctccctggtctttgtttatttatatggcccctatcattacagtccacctatatctacatgtgtgcttatgctccacttaggacctgagttattttggggatgcacattcagacaccacctcagcctttgtatagattcctcagcaccaaccgagccatttttgcccaaaaccatccctgtgagacattgccctgaaaatgatatcttccgcaccggaaatataattcctttcattcttcttccactaccgctcatacaggactgcatggatttctgtcctgagctctatgtcccttgtctctgagccctgagtagtgcctgtcatctcccctcccgcagattctttgcaaatcactgggggaggtgctgtcagggtctgctccttccccagctctgtttcttcccctcctgacacacctgtgggctctaccctgcccccaggcattgacaatgcttgaggctaatgctcagaatctcagtatcttgtcagatcaaacagctgtgacccggtttcccaggcctgccgcctgctctgtgttctggagccctgctgggtgacatgcctactaatgtgatcgccaaggtggtctcttgtctcccttcaaatataaggtaacaataagaaagcttacatttattgtgtgtttactatgtgccagaaactgcaattatgcaatttatttatttagcgcactgcatcctcactctatgaaggaggtagcatttttatttcaatttagagatgacaaaactgagccaagaaagattaagcagcttgctggaggtcccatgtccattaagtggtggagacaggcaatccgccctcagagcctgtgctcctcgtcctaaggctcttgctagatccctgcctggggctggtgcttaaccactgacaggcatcctgatggaggctgtgtcttcgcctgcctgttccaccccaaaccccaaaccctgactgctcaatctcctgactcagctgtctgagagtaagcaccaaagttgcaggcattggctaggcttcactccgtggtggcatggacaagtctttactgccatcagagggtagggtggacaagagacaggacagagcagaggcatgcagctatgcttgtggtctgcacgtcaccgagggccgctgaaggggccgggggacagctaccagcaacagtagcatgcagcattttggatttgagagccgctacttctgggggtgaggcagagaaaccaggcaaaggtaactgacagatgggctttttgagcatatgtggattagaaagatgaacatgaatggaaatgtgaaattaggaggaaccagagcttttgagaagaaaatgccgagtttttttggacctgtgggagattacgctgtttcggaacaccggatacaagctcagaggagtttttagatgtggccatttcaatttgaaacccccttgtcctctggtcttcctacatttttttccatatgcctgagttaattcttacatattagccatatgagtctttgattttacaggttccactaaagtgtcgccttgttagaaggcatcctctgtggccacagtgatttcttcaatgcttccttctttccttctttatcatgaccatttgtgattgaacaattgtatgtcaatgtcacttgtaaaaataattgataatgacagccaacatttgttgagtatttattatgttccaggcacagagctgggctctttttattcagtaatctctttaagtctcacaattatgatgcaggtgctattattacctccattttagagttgaagaaactaaaggtcagggaggttaaataacttatcaaaaatcacacaggcagtgcatgtgaagcaaaaaggaaagcacaagtcagtcagattctacatggtggtcagaatctttttttaaaattttttttgagacagagtctcgctctgttgcccaggctggagtgcagtggcataatcttggctcactacaacttccgcctcctgggctcaaataagtcttatgcctcagcttcccaagtagctgggattgcaggtgcacaccaccacccctggctaatttttgcatttttagtagaaacagggtttcgccatgttgcccaagctggtcacaaactcctggcctcaagtaatccacccaccttggccccccaaagtgctgggagtacaggcatgagccaccatgctgggccagaatctgatttttagagactctttttatcttctaagggttctggttacgggattatgtgaatgatcttcctgaattttgcagaatctaattttctaaagtctaggcacatctgcctctgcctcgcattccctttctggataaacaacccgtctaaggatattcagtcacattatcctaaggatcctattacagcaacgtggcccagttgttcagaattaagtctagactgtgctccctgaactctccagagagatgaaactgtcagacaggtcaaccagaaatttatcaggtattctgctttcagctgacatttccaagagaagctcttcattaccaaatgtatctccctgtacaaaaattgtataattagcattagatagcattatccatacctcccacatggtttggggtccatcatatactctcaaaatgaaccttgtactctttaactgagaaagagaagagcagcccctaacacctaggacctggcctggtgctcacaactgaggtcttgatattgtcccactgagcacaatttcatagaatatcaacatcagatgaggccacaacatcagacaaggccactctgaccaggatggaccatggcaaaaccaggtgcactccattatcatgcctgaagacagacaaaaaaccaacattgtccaaaccacaaaatgaccaaatagtcactcattctgactgatatgagtgcaaagtgttcttttatcaaatagtttgtttttgtggtattttttgtttgtgtgtttgtttgtttgtttgtttgagacggagtctcgctctgtcgccaggccggagtgcagttgcataggctggagtgcagttgcataatctctgctcactgcaacctcagcctcccaggttcaagctattctcctgcctcagcctcccgagtagctgggactacaggcacgtgccaccacgcccagctaatttttaaagatatttttagtagagacaggatttcaccatgtggccaggatggtcttgatctcctgacctcatgatctgccctcctcgggcttgcaaagtgctgggattacaggtgtgagccaccatgcccagccaaatagttttaaattggcttcatttttcctacctcctgcagaagaattattattcagtcataacattgtcccactttcagaaagcatcatccaatccagagtgaagctccacttccttgaactctttccaaaatcactgaatgcaagcccaaatcctatcaatcattccttctacccccttcctactgagatgcccccatggtgtatgtatgtcgacagggcctcactccctcacccaggctggagtgcagtggctcgatcatagctcaccaaagccccgactgcccaagctcaggtgattctcccaccccagcctcccgagtagctgggactacaggcatgtgccaccatgcctgactaatttttttgtgttttttgtagagatggggttttgccatgttgtccaggctggtctcaatctcctgagctcaagcgatcctcctgcctttaccttccaaagtgctgggattacaggtgtgagccactgtgcctgacccttcctttcagtgaatctataaatcagaatgtgctccaccacctggtggtctgtgactaaagtacattgacatacctaaatgctcctcatgatacacattgatagacttgcatataatacatagatttgtgtacaatgcagcttgggattgaaagagcacaagaacttgaccagcctcaggtttgaatcccaactcttccttttcctcctcctccttttcttaaaaaaaaaaaaaaaaaaaaaaaaaaaaaggtttgagtcagttacttgaattttctaacccttaattctaatattctaatatcataggtttgttatgaagattaaatgagatcacagatgcagaattttctagatagaatattgccagattctaggctgatgctcaaggactgggtgtttctttccctgatcccttcttgtttgagtcaacttcttttttttttttttttttttttttttgatggagtctcgctctgtcacccaggctggagtgtaatagcatgatctcggctcactgcaacctccaactcctaggtttaagtgatcctcctgcctcagcctcctgagtagctgggattacaggcatgcaccaccatgcctggttaatttttgtatttttagcagagacgaggtttcaccatgttggtcaggctggtctcgaactcctgacctcgtgatctgcctgcctcagctcccaaagtgctgggattacaggcatgaaccaccacgcccagctgagtcaacttcttctaataaggcattttacccaactgccatactccagaaagacattttaacccaccaaaccttgaggatctttagaaattgtacgtcaaaatctccagtttgttcgacttcctattgtctgtgccataactcactgatatataaagcccattgactaatgagtactaacgtattttattcattctaagatatacggccttttaaccaacactttaataaggcatcttaaaaggaagatttggggatgcaaattgggatgtgccttataattagcggcatgtcatggtttaactggcagctttgtttctttccttgtggaacaaaatattcatgaattttacatcaataacatcttggatttaataaaatatgacatctatttttaaactattggatacttttttttattatttcaccttttcaccattgtatttagggtcattgtctgtgtcttatttcaattctgaccctaaagttctaaaatcaaatgtaaactcaagaagtaaattttttaagaatttggactgaaaacctgtaagttataatcagagtccaagtcatggttagtagggatatttacataagatgagctctgacacagacccaaaaataagttgatataacaaatggaaattgctacacaattgatactatcatgtaatggtgttaaaataatgataaaaaataatctgaacaagttctgtggagcttttgttctatttgactttaagtggaacataatcttcagaacaagaggacaacaaaataatgctttgctaaaaggataaaagaatatgacctaagtctattagtaatataacactctatgaatgcactcaagttaatagcatcttttagcaatagatactttttcaattatagtaatgtgaagaaatagactaagtgagggaaaatggtaagagacacatgaattggactaattgtttggctggttggttttttataaccaactcttgggaaggaaaaaagtctccaacaatctcttgatgagacattaatttgagttttcatattctagatctacttaatcttcgtaggaatgcaatattttgttaccccatctttgaagaaggtttgaaactcttggtaatttgcttgtagtgagttgtgcgacatctttctcttcctgatcaattttgtggtgttgtctgttatagaagctctattaccataagggtttgctaactaggtgtgatgctacaatttcatgcaatgtaattcctctgggggtaggtatttccttcctgtcctttactgagttctaaatgaccctcctttcaccaattttgagttgcacacaagagtggattgcaaatgctacccttttggagtatctgtgtagaaatgctgttttatttctgctttaagggatttaaaattttcattcccctaatttaaagtggtgctttggctacttttgtaaagaatgtggtgttctgagagcaaataactgaaatggataggccagactcttatcttcatggaccctcacaaatggaaaagtaaagatatggatatggaaggagaaagtggtcaggaaaattgccataaataagagagcaatgatattgggctacatttggcaccagttttgttgtgttttaaaaaggataaatatggttccctttaagagaatatgggagcagctcttcctgctgtgaacctcttccttgggcatcctcccagcaggttgcatggggtgagaagtggcccaggttattactgtgattgagagcattcctccagcacattttctttctccacattctcacgcctcccccttgacttttgtgggataggatttaagagtctactgcaaatgtctgatacaagttaggagctgtgggtgcattcctgcttttagtactgctcaaataaaaaagaaagggaggaagaaggaaggaatgaaaaagagagaaaggaaacaagaaagggaggagtgaaggagaaaaggatggaggaaggaagagaggaaggacaaggagaaagggaaagaattatgaactcaaacccagtgcttcttgcactttaccgtgggcattgtgcatcacctaggggctttgttataatgtagattctgatttggcgggtctgaggcctggcttgactgggacctgagcatctgcctttctcacaaggtcccaagggatgccaatgctgctggcccaggggtcacacttgactatggagaccctaaactaagaatgcagctgcacttagctcattattaacatttttttaaagacgattgcggggggtgcttatttcttaggaatttggtcaagttttcctggggaaaaaaatggggcacaggaaaaggatgtctctggtgggacccactcttccccttcccccacttctctgccatttcccctccacccaccatactgggaatgtagagtgctctggggccaggttccattagatgcagaggaaaatatctgaaaaatgcaatttgtatcatgatattggtgatttattgtggtctgtctttttgaaatatttgcattttatgtataatgtagtgtagtcttgaagtcaaatggaattgcattcagatcccaactctatcactcactaactgtgaccacacgtgaattacttaacctgtctaaaccttagtttccacatctgcaaaatgggaatgatggtcctgattacacagaccttctgtgaagatttaatgagaaaacagatataaaatactgagtatagtggctggcacatggtaagtattgagtcgatggcagctattgcaaaatgtttgagcagtagagaaacctaattggataaagacgtgatcctgccatcagtgagaaagcccggatacactcatctctctgctgcttcctcattgtgccaaacaggcagtgagttaatttctgtctatttatttagacagtttatacagttttgtttcctgtataaatgaatggaataatcataaacacctaatagggttattgtaagagttgaagaaataatatatacaaagtcattagtgtatgacctggcacatagaaatgtgtatatatgaaggaaattatatttttgtctcttaaaaataaggattaagggaagaaaggaattctttattcaaaattattttgaataaagaggagtgttggccacacattcctgtgcctagaagaataaaagcagtgagcatgctgtgattcctcaaatcctaccttgctcacatgaaacacatgaaactcccaaacactccaaacagaccagggtccatctacgatgaaacagtcactggtcaaaaggaaagtgaaaaagaaagcaggatgctgcgagtttttcattaggctgaaattcttcattttaaaggattgtcttgagatcgagaacacatccttggggtgggagaagggcattaaaaatgtcttgtttgatcatgatagtgagaggtgaagccagctgggcttctgggtcaggtggggacttggagaagttttctgtctagctaaaggattgtaaatgcaccaatcagcgctctgtatctagctaaaggtttgtaaacacaccaatcagcactctgtaaaaacggagcaatcagcactctgtaaagtggaccaatcagcgctctgtaaagtggaccaatcagcgctctgtaaaatggaccaatcagcaggatgtgggctgggccaaagaaaggaataaaagctggccacctgagctagcagtggtaacccactccggtccccttctacgctgtgggatatttgttctttcgttcttcacagtaacttttgctggtgctccctctttgcttccgcactacctttatgagctgtaacactcaccgcgaaggtctgcagcttcactccttaagtcagcgagaccacgaacccccccggggaggaagaagcaattctggacgtgccacctttaagagcttaacactgtgaaggtctgcagcttcacttctgaagccggcgagaccaagaacccaccagaaggagaaactccggacacatctgaaggaacaaactccgcacacaccatctttaagaactgtaacactcaccacgagggtccgcggtttcattcttgaagtcagccagaccaagaacccagcggaaggaaccaattctggacacagtagcacatgacaattaaaatttttttcttggaaaaattaaatttcaagattcatattcctattgtcccaattattaatgttctcatttaatttgactgcactgtgaaatctcaaaatctgggcaggtccacggtctgtgatcatttaatcacctgccctttgcagacacaaatgcagctactgcccaggaagaaccactgtcttctgtgttgaaggtctctgaggtcttgtaccatgcatattagcagaagtgactgcacccagaggctatcattttcaattgaaataatggcttattctgttgtaactcatgcttaaatcatattctgcatgacagattagtaccctccttgctgctgaagggttgtgcagcgttcagacttctggaaggcatctggggtcttggaggagaagaggggaatgagatatcactgtcattctcacgataattttggtctgagccaagcgtgcggattcatgtcaccacaacacagggatctctgttcagtccccatctcctctttaggcttcggtttccagtatccatgtggggccacttggttaacagtctcggtgagtaaaaacagttgaaaatctcgtaagaaggtgtcagatggggaagtcctgtaggtctgtaaggctgcaaagagagccttggagatattagaacacaaatcagaatgttttagaagtgggctgaagggtgggatcttgcaaaaagaactacagcgttctctagccttgccatttccacatcacagtactgtaatgcaggtagcaggtaagaaaacatggactagctctcctcacttcgcccacatctcctcacccccaaaacgctcttctctctctctctcctcacctaagctagtcccacaatttcaaagattatttaacagctttggccatttttcaagcacatttaaagccagctcttggtaattcttgactgttttactataggtaggtaaactgaaaacaatttaaaactaggccaattacactgccttgcagaatctagatcttgtccccttgtcaagctccacagtgattcggcggccagccaggagagaaaaatctgtggtggtggtagtgaaagcgaaacactgttacaaaggtagatctacagctgaagaaaggcaggtgacacctttcgaatgcttccttttttgaagaattcataccttgtctctctattatcagcatagataatgagttagaaaacaaaatcgtattttatcaatttcccaccaaatgatatgtttaggaggtcattcataatgacctgtaatagacatgttgatgatttgtagatttgatttcttattggggaaaaaaagccatgtttaaattcctctgtagatataagcattcttaagaatttgcactaatttgggccgggcgcagtggctcacgcctgtaatcccagcacttttgagagtctgaggcaggcagatcacctgaggttaggagttccagaccagcctggccaacatggaaaaacactgtctctactaaaaatacaaacattagccaggtgtggtggtgtgtgcctgtaattccagctactcaggaggctgagacaggagaatcgcttgaacccaggagatggaagttgcagtgagctgagatcaagccactacaccctagcctgggccacagagcgagactccatctcaagaaaaaaaaaaagaaaaaagaatttgcactgatttagaaaagcaactttcttgaagcagtttcaagtgcagggacaattttcaaaatttgaggatcctttctgaggtttcttgaaggaaaactagtaacccaaaattgtatggaaaccgagtcagtggaatcggcagcgagctatggggagggcccctttcacgagcaggtgatggctgcagtctcacagagcccggcagcccccagaaccccatggctgggatttaatgccctgaggtcaccatcctgaatttctttagaatttgtctgtgaatttgtgttttatgagtaaagtccaatgggacatctgagcgtgtaggagggtggagggggcttagagtttcctcacctccccaggacaggacgggctctggctgcccactctctgcccctggaagcctcagtgtggctgtcacatgctccactctgcccttctcagggggcttgggctcaggtgaggggaaggtcatatgctcagcatgcaactcctcaagggtcttcctgtccaacccgatccaggtctccaacacatcccagccggaaggttacaatcccttgggttcgcccatgtgcgataggttggggtggtgccttggggaaggagggattgatttaccagccgcaggccaggacctgcgtttgtaatttgcactgatccccacaaattatttaaccccattggcacagggttgagcaaggacgaagcaagagggaggctgcttagatgggcatgaaagcccagaacatgtgtggctgcaccatctgtggattccagagcccagctatcagttgtaaggagactatccagggatggagcgcagtgttgagggtgcctcctagcaatgaccttgtcagagcaagtgtgcatttcctgggagaactgtgttgaaatgagcaaggcttcttagacttaaaaaggcattttaaaaatcagacaaactatttttgaatgctctaaaatctgtgtctgacttcgttccgctgattctgacacacacctctatcattttaaggatttgaactcactgtgatgtacctcaacaccaccatacacacatacatatagagatacatacatatgtatattcttacatatgaaggcctggagctggcctgtgggagatacaaaatgagttagagacttttccctgaaagaacttacactcttgtagagatagcagtactcaaggaataatttctactcccaaagttctctaactgcctaaagtatgtcatggaattttgccaaaatacatttgatgactatctccttttttcctgtctctctgagaaaaagtatttacagaaaatgagacctttattgggctggatatcacaggagtttcgctctgcttttattagatagatgtgaaaacaaatgataaaaaattattggaggaagactgagggatgtttagtaaattttgaagaaaaaagtcattaaagtcttctatagcacagactaaatctacctataaaaaatgaagcaattattgaggaattttggcagaaagtacaaaaacatcttcagtccaaataagagatttgtagaatttctttttgtagtttatctaactgtcccaaatctccctttggcttttcatgtgtagatgcagccttaaaataaagatttagaaccacttaggacctagacccctcacccaaagaaagctggacttccttctgctggagccagataagtcactcactgtaagaataaagaaatgcatttttcatattaatgtaatcagacagtcttggttctccaggtctcaataggtgaatttacaagtacctgacaatgtaatttgcaaaaacgtacaaaccattttgtggattaatgaatgtttgatttccaagcatggcttgtagaattagccttagagtctcagattctactaagggtctctacagtgttctgtacataaatacctgtgtgaccagtatcataaagaaattctaactggcaataaaaagtggcaaacagtggcagtagctcagcagagatttttatagacacctccactccctccttggcatttagtaatcttgaaaaaattgaaaggaagaaaagtttaatttagaggggacttttgctctgcttagctgggattctcacacccaacatgaaataataatgcatccaactgtccgtcttagaataagtaacctttgtgtcacctccttcactggtggaaactgcaaacagtcggtgagaaaggtatgaataccagagaaagctgagggatctctgtgaccttcatgtgattatgtttgtgctaatgcagagagcacagaaacccaaactctctatccaaagaacccaattcataaaaaatgcattggtcattaaccagggaatcttaagcactgtactttggagggatcgctgacacatgggaggaagtggagttgttttgcttgggatgagcaattcgtatttgcagttctgttcctttctcaatctgccctggccgtcatatcctctttgcaaagggtaaggctccagaaaggagtatatactctcgggattaaaaagagtatatgtgtttcttaaaatgacttacttggaagagtcaactccaaaaagagggaacaattcaaaactctgtgcaagagtgaacatctattttacttttagtgtagctaagagatgctgagactggtttcccttggtgaatgaaaatctgttgtaccaatttttttttaaaagaattggaaaacaaaaatgaacttgctatgaggagtgcggtgacagttattggtgacggttcttcagggactcagcttgagctgggtggagagaatggagtgtgggaggcttggtcctcaggagggcactgaagaaaggagtgtcgtgctcaggtggtcaccccctcacctctgtgggtcacagtcccttcagagcagagggatctgcaggcaccctgtgggtttcagatgtgagatcaaccctgggaccaatggtgttgagtgaacaaatgccctctgacaaccaggtcttataacaattaataataagttgtatccaagtgtaccatccaaactcctaatcagtattttgatgtcttcaccatttatgacctatcatttccataatagattcaaaacagggtttcttgtatttgcagagaattaacttctattatgtagctattttaaattttatattatgatccctttaaaatcagttattatatttttaaaattacctgtgaacaaatcacaattacaaaacagatgtatctgagatgattcctcccttgctaagctagaagtcagtcaggattatgatgaaagaatggtgcagataaagaagcttggaaggccaaggggattacactagctgcagacccatctgccattcagaaaacggattgcatatggcagtcttagcgcaaaggagattcagccttgcctgggtaacgtctaagccactgctggctccctgtggtcttcagtcacaggtagagtttcataaaacattcacgtgagctacgctttagatgctctgtcagtagcctcatgagggatatcaacctctgtgttcaggaagctccacaaatgattcgcaggcctgggtgaaaaccacttctataagccatggtatatgtaaaaatttggaaactttgccactatctttgtgccatatttcctgattatgctaccatggactaaaggaagcaactctatatgtaaacatcttgctttgtaggctcttcaggacccaactatttagtcgagttccaaacgttcatccagtggtgccaaggacagagttagagtcagcgcacagtggccacctttagtcagtgtgcaagagaatgtaaattccacacaaagggacagaggggcaggaatatgaattgagttgacttggggcaggtcactattatagacaaataatattaaatattattagattaaatacaatttaggctgggcattgtggctcatgcctaaaatcccagcactttgggaggctaatgtgggaggatcacttgaggccaggagttcaagaccagtatgggcaatggagtgagatgatttctgtaccaacaagaaaaaaagaaaaaaaaagaaaaaattagctgggtgtagtggctcgctcctgtagtctcagctactcagaaggctgaagcaggaggattgcttgagcccaggagatcaaggttgcagtgagcaatggtcacaccactgcactctcgctggagcaacagagtgagatactgtctctctcaaaaaaaaatacaaattaaatattttcattaaataataataatcaagagaaatagcacttatatggcaagcatgcgctgtttcatgaaagttacatacatattagttcatttaatcttcacaacagcaatgctgtgagaggggtactgttgttatccctgacttttacaacgtgatgcatgaagttggaaaacaagccagagttcacattctcagttaagtggtagtgctaaatttaaacccaggcagagtttaaatttttttagagttcttggttttaactcttacaccaaacggcttttaatatctaaattggaatcgaggtggaatttgccaataagctaataatttaaagatatttcaaaggtttatgttaaacaacagtgagtagtcacgtggatgccagtacctatcttaaaggaattatatcactgctgaattaaaagccagacccctatttctattgaaaaagaaatgtgaatgaaatgacagcataaagtgatgaaccagcagcacagcccctgtcccatagagctcatagttgctgcctcaaaagcataggctgctaacttcagaacagacttcagagagctttcctggaattccttggtctcagagatgtaacatgtttcctaggctcctggtcaggaggaacccacccaacccattcaagtttgtgttttcatatctgtgcccatgaaaatatccaatgtcaaattctctgcaaacgttcagctaagtgttgcttcaaatctctctgaaacccttagccaacgccatttattcattctgacttcctgattccccctctggctctgagaaggcccctgattccagagccgccttccaaccagacggattagtttatggtcctgcaaggttatgcgtgatacatctgtttggggaaaatggggatgcacactaagaagaaacattacttttggatccaggcaggagagcatacataatctcctctagagcctgtgaaagacttcattttacacatgaaattgtgtggaattgccctggactgcactgaacgtggtttttgagaattaaccagcctcagaacaagctactgagcaccagctaggcctcaaagcaacaaagaataaatgtaagcaaatgtaatctgtgtaaagttgaggggaacaaatgcacaatcttgttgacacagtgcctgtgtgagaccaatcctaaacattacaatggcatgcattagaaacagagtcaaaaagtgggcttggtatgcatgaaagaaaaaagagacagaagggcttggcatggtatagaaattttttagaatgcaggtattcattttctaattgcttaaaagggcttttctatttttctgtgcattgtaaaaacactcttttcatagtctggtataaaaacccatgcctggcaagtatgggaaaacaaccaaatttttaaaaaattgtgcatttttagccatttgagaatttgcctaatctgaatatttgaccaaaacatcactttgaaacctcataagctctttgaagtacataaatttctgctgagaattttagggcaaaattggacttgggtatataagaaagaacagagacttgcaaggtttgcactgcacaagccatctcccagcttcaaatgccgtgcttttaagcataataggtaaatcacatctaaaaaatttagaagaaaggtcttctgcacattatgaggaagtggttggcatcttatgatgggtcatcttacccttgttattaaatgacagcaatcattaaaatgccaaacatattttgtcagaattcactttataaaatgtcagcaagtctgtgtttttattagtttgttccaaatcaatttagaaatttcaatagaatgcttgtaagtattctccaagcaatgtccattcctgactttctgcacaaaaaatattacaaattaatcagattttcagatttctgcataatggctttgcacatttattgcttaatcctattataaaatgctgttatgattgacacattgtggtagagatagaagtcaattgaataatatgtagcagtcaattttatttgtagcttaatgtgctgaagtattttcccccatttccattatttataagtctgtccctttggagaatatataggagaatttgttttaaatgagccaataataccttctttaaaatttataagtgtgacagagtcatatctttttttctgggttgtccatggcatgccggtaaacagggtttgaattgtcttccacttgttattcataggacaaacatcaggaaaaaggatcttgttaaggtttgcttggaattggatttcaaccacccattagaaaactccaaggaaacaaagctaccaagtagaaattctcaaaaattgccactggttttatttgttttgtttgtttgtttgtgtatctattgtttctaccactatcttacctgctatagtttgtcctgaaacaaagcacagaaacacacgtagagaaatgaccatgataaaagggtttgaaggatttgctctttggtggaatttcattttttctgctttgctgtccagtaggattctggtaaaggaagcaagttgtgttctgtgcttagcatggcggagctccctggagctattgcgggattcctactgtttcaattagcacctgggacacttgcttggggagagccatattctttttagaacattttataaggtgatatggaaaaaggctttgttttcaggaaagcgatgtcataagattcagtgttcaaagagtacggaataagaacttgggagtatgaaggagatggggaaagccatattagggaatatgaaggagatggggaaagccatattaggggaaatattgatagacttggtcatatctgagatcacattttgtttaattttaggaaactagattagctgtggctcgcctgtacttaaaggttgcagcttcccacacatacaacacactggcatactctatgcaaactgactgtgctacattccctgctgttctattcttctacctcttgatgaacttggccatcctgaatgtctctcatcattatgtatgcagttgataagtgatttgagcactggagatattgataaaccactctgtcatatcatctatgccttaatgttatgtgacatcagttcccaagctggatcatatattaagggagtatttctcttttgaattccaggggctagaggaaacccagcattatcagacccaggcactcctgaccaacaccaggccagtcagacccaccccccatttccagttgggccacaggtcagtatctctcaactgctttccactgggctgcatttaggatggtttaaccatataaatcaccaaataaataataatgagttaaatccaattgactccaacagagcaaagatggtaataaattttcgtatgaaaagctgtatgactacattatttattaaataccaccaagaaaatatgtgtttgcaaaactcttctctcttcttaaaggaaaggttggctttaatcatgtggaaacacttttttttttttatcttaaaacccactacaattgtgctgttggttaccgtgcagtttcctggaaagtaaaactttaatgactggagtgtgaagaaaattaagttatttcaaccttactatagccatttttgaaatagaagatgtgatttaatataaaaaagttaatgcaattttaatgcaagttcagcttattgggtttgacaatactgtacatcacacatagctcttgcattaataaagaaatacaatcattattttttaaagtccaatatttgttttttgcagcctggtgtgggctatatggagatgtagaacacaattataaaaggctgggcttttttttttttttttcctttttacctctatcatttagtgtgaagctttcagagttcatcctgcttttttggaaagagaagctgagacttgggcctttctctcccttttattgtcattattgctcctggaagttaatgactttaagcacattgagggctcacccaagtttagagtgagggttggccttgacattcttattccactcgccaccaagactccctatggcctcagatcccgtagtccatctcggaggacagatcactctgtgcctgtggacagaaagcctggggaaatgtctgctggcttatggaagcctagagagttttcctgggactctcaggaacaggatttttggtgtcatacgctttataattttatgcttgtaacattgtgtgtgtgttcatgtaattatgtgtgtctgtgtgtgtgtatgtctgcacacctgcctgtgaacatactgggggtaacacactctaatgccttcaggttgggtaggcagccccacaggcccaggtcagtgaggagtggtggccctccgacaaactggagagtgcatgccctgccttgagcccacaaatcctatttttaaaatgctgcaggccaaaacccccaaatctatgacccatatatggtctgagagctacttatttgccttccctcttaccataatatcactattggcagtgatgtaacacctggaatctgagggccagcatataattttgtatacattcccgaagtatatttattttgctcattagaataactgtatttttttaaaaagggaagcacagttacttggtgtgaatttagcaaagtgcacaaatacattaggagcaaggcctgtggggtctaaagcagcagttctaaactcagctgtgcagaatcctagggctctgcagagtctcccccaaagggtcctgaaaggaacactgcagggaatggccaagtatgggcttagccctctccacacctcccctcattcttcagataaagcagccccacttctctaaatctgttctttgtattggaggggatacaagaaaggggtaaaacatgggctgtggagcagccttcctgggcttgaacttgaaccccctctcaactagacatgggacttgggcaagttactaacctctctgtatctcattggtagattaactacagcattagaatagtgcctggctattatacattgagcttagtagtatgcctgtatttaatttcctacccctcacataagagttttgcattggttcttgtagaagaacaacagatacaggattattatgttccacatggctcccacaaggctgcaatgaaagtcctgaatcaaggactctaagatcaaatgactcttgtggtcatctggcttgaccagggcaggaatccttcccatgtcatcctggtgaagagcccacgtgctgcactcaaaacatgccgagcagttgcctttccctaccagagaagggctgttccatccatagtggatgtaaacatgtgtttgtataatatcattttaattgggcaaatgatgttagagtaataacaaaagaattattttcaaagattttaagttttatccacatcaaatatttttatgtcttacattctgttttagatcttgtcattgtacatacataattctaccattttaacaataatcattcaagtttacttaatagttatccagcttactttctattttattctcatattataaacattttctatttttctaaagaggtgtcataatgatccattttaatgactatgcaatatttcatctagtttagtactgtaataagctattttcaatatttatgtattttgaaacaatacatgtttttatgcagttatcttatttccttttgaataatatcttcaagctatatcctaggagtatattctgagttaaagggggataaatatttttgcagctcttgataatctatttctaaattgctttccaaaaggattatgctagtgtacatgtcccccagccatagatctgcataatggtgtcaatacagactttccagcattgagtaaattttctacattatttttgttaatttaaaagtcaaaagtagtatttcgttgctctttttgaatcaaaaaatcccactgatcccaatgagttctttctggaacaacagagaataaattagctgagagcttcaaatatatgaagataggatcaaatggaaactcaatggaagagtagcatataaacgtaagttattacttgtaaagatatttgagttcctcacaagaagtccaaaccaaatgaaattttccaaagaaatcaatgaaatgcaactttgaaaatttttttctaccaatcatttttttttaatgagatagggcatgttttttggtacttcttcgggaactttctgaccctacttaagtggaaagaagatgtttttaaaacccatgccttggttccacaggaaagtgagctagctgtatctgtttccttgcagccacttctgacggcacagcagttagcttctgctgtggccggcgtgatgccgggaggccccccagccctcaaccagccaatcctcattcccttcaacatggcgggacagctaggaggccagcaaggactggttctcacactgccaacagcgaatctcaccaacatccaagggctggtggcagcagctgcagccggaggcattatgactctgccactgcaaaatctacaaggtaatccataatgtccatgcgccacgtaaggctctacccgttggccagtattctctgaagtgggcaaaaaaaaatgtgcctagaatggtgaatgtggttcagagttgcttctgccctaaatgatatggaaggcttccacaggaagcaaaattttcagttgtctgtgaatcctgagcctgcacaagccattggttttatcaatcctcatttcctaacattggtatcaaaacttttcaggactcctggaagcatttatgagtcatcattgcatgacatatcagaaacttaaaagtaaaattcctgtgttgttatttgaagacctgagttatcatctcaccaattcttcaatttagccatgggtaaagaaaagttagaggttgcttttttgtgtttgaagtgattggaacatctcaaatacaagatattatttggaataatttattaatgattattttgctctacaaagtatgttttagttatagttattaaacaaaaattgtgttatttgagctcatattttgcaatgagaaaaatagacttgtatgttgagcctttatactacagggacatataacaagtcagactctaattttacttaggaagggtagttgtcttgatattatgaaggttttgacttttctttaaaagatttggtagcattgactgatagattgatttacaaaagattctgtcagaggagtaattattttggtggaaaatgacctgaatataaataggatgcctgctaaagagaaaatgaatttattttggactagtcaaagatgtttgttttcttcatatatatataaaattaacaattaaaatttttgcagaatgagggcctgtctgggtaagttatcagaatagcaatttaaaatacttttttagctggtcaaatgttagggcttcatataatttatcggagaatcagtccacaagactaagaaacagaccaagtaagaactgttcactcttgacccaaacttctttccgttctctatgttctgttaccccacccattgttgccacttcttgacttccattttgatgtttaaaacgaagtctctcttgtaccattaaattgtgccaagaaacctgccattcataaatcatgcatgcccaggatacgctaatgcacaaactttgcttgtttcaaatttgagagtgcctgggaagccagatctcaagattaagcaaataaagcaggaatacacaaggtgaaagccgaagcaacaaagtgtagggagaggcgttttaatgtaggtggatgatgaaatcttaatgaagaaatgggcattatcaaaatgcagccttccgtttggaacatttgtgcttatgggaatattgaatattataaataaacataagctcaaagagctcctaggccatgaattaatcctgcttggttaagatggttgccaaaaatcagagtttaaaaaaaaagtaggcttgttatttcttgatcatagtttgatattcttaagatattagtacctgtttttttaagggttcaaaattaatgattggtccaacgtggacttcttccaccaagattttcccttttgtttttgtttgttgtaaatatcaaagttcattattagcgtatagtttggagtttggttctttgagtcacctctggtttcagaaaaggaatcccaagctttgtagcctgattaagtaggggaaacaaaagttcttgcttttcttatccctgggcacttctgacacaatttccctctcagcatcatcttcagaagtgggttggagttgacgcccaagctcttgtctgctacacaagcacaagtgaacatttccccctttgtcttcctctttgaaatttgactgacgttggagggaaggtgatgaggttattagaataaatcacctcccagttgcaaatcagctggttataggaaaagctttctaattagtataagtctcaggtaacccagaaagaggtggtcatcctaacgagaagttcaagggcaataaggatggtaatcaggaaagtctcatgcctcaaaagtgcccaagataaatgtccaccacctaaagggcaaagccagtggtcaccttgtaatcaatccaccagcagccatcccaaagctgattttcccacctttaggcgacctattgcacagcccttgataatccctaggcagaatcaatggcttgtggagctttccaggttatgttgcagaagcagtgggactcgggatggtgagtgaatgtctgacaggctgaaaggtcatctgcaggggttctgagactgagctagtcttcaggatgacctcaaatctcatcctctctcaaaggtgagagttaagggtgagagtcttgtaaatggactatcagtaccttagaaggaatccttacatgcattcatgcagtcaacagcgaggggagaaggctgtttcctttcccccatctctttcctgtacaataaatacagtatttatcaacccaaggcttttcagagtctttaaaaacaactcttaagtctgctcgtctataataaacaccccacttctccagtgattttataaaacatatttggtgggtcattgtgaggggcaggtttcatacctagtctgcacacctagtctgaagcacagcctgttaccatgtaacatgcttggtcatgaatagtgcccttttcctcattgtgaagtgttaagcttttattcatgaaacagttcggccaactggaattatctccagccttcctacccagccctctagcctgtctattcttctagctcaaaagtcacaaatttgctaggatgaaaggaaaaaaaaaagttgctgacatcagtctcttaatggtttggaattcagggataagttttcaaatattttcctttttactgaagtgattgagagcgtgttcatttacatcccctatcaagtcacacagaatagctctcagagccttggaggccatgatttacacatgtattttaatgagcactcatgacatgctgttacactgagagcagctcttctcgactctgacagcgggggtcatatcacaatctcctcttaaaacatggtccccagaccagcggcatcaatgtctcctgggagcttgctggaaatacaggatctcaggctctacccgagatacccaagactctcggaacagaatctgcatttttaaaagatccccagataatccccatgcacattaaagtttaagaaatgctgatctagggagattattcaaagttcattaggcaactccctgccttagtctgtttgggctgctataacataaaaaccataggtagggtggtttataaacaacagattgtattcctcacagtgctgcagcctgggaagtccaggatcaaggcacaggcagatttggttctggtgaaggcccacttcctggttcatagatgtctgtctttttactgtgtcctcccaccacagaaggtatgagagaactctcagggttccttttataaaggcactaatttcgtcatgagggctccacccttatgacctaatcaactcccagaggcctcacctgctgataccatcaccttgggggttaggatttcaacataaaaacttggtgggttgggaggaacaaacacccagtccatggcatcccccaatatcaccagcagccagaatcagagactcttatgacaatggatgacccacatgaaggcagtgaatgtccttattaatgctcccgctctcactcaccaccccaggcctccagatgagaatgacagaaaggaataatgtgtgggaacgtttttgcttctgttaggagtttcatatcctcaagaccaagggaagttctcttacatagtggaagccctcttgaagtccttgctctgagattttatccaatgaaagttttgctttgctgataaaaagaccttataactcagcagaaaacctgtatgtgtggcctgggaattattttatctttctctcagatccttcccagcaagaaagagattgattcctgtctcatcagtgatgagttcttattgtaagaagatacacagttgtaaggagttagacatcttgcaggatcctaggaacagccctgtaacccagcctcattggaacctggaatgaatttgggcattagagcatccagcaaaccacaaggctgcaggctgtatcatcctctcctctgcaggaggcaggcatctaatccccacacccagaatgactaatgacccatctccctgtcttctcctgcgccctccaggacgtttctctactgcattggatggcttttggctgaaccatgattccggttcactcatgttccattttgtctcctctaaggtcaggcatctttccaattcatgtacctgtcaggaactctccatttttctctgtctccatcatctttatccttatctccatgtctgtctaaaattctgactatccaagagagaaattaccatgaggctgagccttttaatttaagctatctcatgtcactggccagactggagattgactgcccccagactgagatgttcgtttctgtcctcttggctatgatgtgggtgggaagtgggaagccagaatgatgtggtatggaacatggacaagcgagcttaagaaacaagctgagcctctctcatcagcagaaggggtggcaggtaaggcaggctggacattggcctttctcttgggaacagtaaaagccagtagggcctcttatgagcaaggactgaaacaaattctgagctcaggagatgccaatggtgaggtttaggttctgagtgttttgaacgaagaccttggaagctctgggtgggattcagaaatgctctactcagagcattcagatgagatctagaaatgacctcctcctcaaagccctgtgtccctatgtgaaataagtgagttctgtgccctctcgtaccttgccttgagtgcccctttccccttccaagtaccatccatcatcagctacactgggtctctccatccctgcgtcctttatcccatgtttattgggctttggcctctgatgactgtaagcaagcacacacctgtgaaataagacgaataatagccataaactccaaagaaagaagataattaagcttgctctgtcacatattccataagctccttgaaaagtcagtgtcttcccttttactattactttggaacacagatagctgtactaaagatgtgcagtcctagggtaaaaacagaggttgttagttgatgtagcaaaataaaatcccctttatggagctcatgcaaatgtgttggatcctttgcttttttgaaacataggcaggaaatgaagatatatacagcctcgatgtgagtgacaacaggcagcaaaagggttaatggaacggtagagctgagtctacttctgggacagatggttcaggttagtgacttgttctcacagcacaggccagaatgacctactaatcactgtaggcaacatgaatggagaatataaatgtgctacataggagatttatgtcaaagtgtgaacattccagttaagtcaagcataacatttaaattaatgaccaaaaatacattaaagagtgctgctaaacctgaacatggaaaagcaattaggttcaaggccagttgaaaaatcaaggccaaggatggtttttcttcccttcactctagcaggaaacctgccccggttttctctgactccccaaattaaagcctgtggatgctgaagtacctgggaatagtttggggattagggatttcatgtgcaagttacattatattccattttgtttgtatgattgttgttttcactgaggtatcctttacatacaagaaaatgcatggaccttacttgcttagttaaatgagttttgataattgcatccacccatgcaggctccatcaatacagaaaacatttaattatctctaaaagattcctctgtgtccctttgcagtcagtcccctccatccaaccaggtaatctgtttttttcctgttctagaacttcacataaatggattcatattatatgtattcttttgtgtctggcttttctcattcggcataatgtttttgaggttcatccatgttgtcgtgtatacaacagtatagtagttcctttctgttaatttccaagcagtgtttcatcataaaaatatgctacattttgtttatctatgaccattccaacatcccagtgggcagacatcacggaggttccttgattgggtgtctctagggaagcacctttggccactgttctctttggcccttggccacacccctgggagattctttcctgtccgttatcttccttggccacatctgatgaggaagttgaggaatatacctttcttcggggagtttctcagtccctgtatagcttatagatgctggagatctaatgggctgcttgatgtttccaacagatagggatgtgtagctcctttgaaaatgcagtccctcagaaaagggaatgcttcttttctttctgcttccagtcagttccctgtgccaaagttttttccaagacagacatcttgaatctaatttattttgctttcttgttccctacacccttctctttcaattaaatcagccttgatgtgagggcattctggcctccttggtgttctttgcacgtactcctagcccagggccttttgcacaggctgttccctctgcctgaagcactctgttcccacccagaaagcatcaagccttccttcctcctcctcccctgccccagcactcctgtctcccttactcgctttctgcattttctttttccctaacacttaggaccttttacaaaatctcaaaagtgtttggttttctttatttggcctttctgagcattttgggtgatgcctactgtagccatcgagggcaaggtcagcagcattgtgatgcttgggcctgctgctgtagaggagaatctctgtgtatgatgtattgctaatgtgcatcatttatgtctgactctgcccctagaatggaagccctgtgacaggcatctttatttggttcaataaagtggcccaagaacagagaaagtgcctagcttacttgtaaaaggtgctcaagtgtgaatgagtgaattttaaagactaagagtccagtaaagagaagtaaagagagcattcagtgtagagaagaaggcatgaggagactagagtctacaggttctatcaatagctctgtctgttcaatgaaaattgggaatccaaggtggcaagaaatcagactacaggagcgggaagaaggcaacactgaggaccttgtatgctttgcctgtgtgtgagcgtggccatcatagagcctgaaatgttagagatgaacatacttaaaaacaatgcagttatgctataatttttcatggatatatgtttgcatttacttacttatgcctgggtaatctcaagaatttgaagcagcttgtaatgtaagaagcaggaaggaggccgaaagtggtagctcatgcctgtaatcccagcactttgggaggctgaggcaggccaattacctgaggtcacaagttcaagaccagcctggccaacatggcaaaaccccatctctactaaaaatacaaaatttagcaggacatcatggtgggcacctatagtcccagctattcaggaggctgaggcatgagaatcgcttgtacttgggaggcggaagttgcagtgagctgagatcacgccactggactccagcctgggcaacagagtgagactccatctcaaaaataaataaataaataaaaacaagaagcgagaaagagcaaaatctttttaatagaaaaagaaaaaacctagagtaagttttggaactagaagacaaatcagaactatatatcgagttatatagttttaattatctgacagtaaaagaccacaccagtttgataagaaacagacctatttatttttgtttttctattaaggcaacatttattcatttgttcaatgaatatttactgaactttcaaagcattagaggtagtgatctggacttaggacatagcaataaacaaagagttccttaatgcacatatacgctactgggggagtgaagtagatggaggtggggaagcgtggcagggatggggatgtgatgcattttatgcaaggtcataagttgtggtctctacactgcacagagacccaatggatgagagggattaagctgtccaatatctgaagaaagagtgtcccagggagaagtcctaagtgctaagcacaaaatctcaaaatctccaacaggaaggtgtgtttctttgttgatttcatattacatatgggtcataggtgtgcagtgactctgctgcacatccttcaccttctaggatccaggcagaagaagcagcccctgtctgggatatgtttttttcgttacaaagggagcagggaatgccagaactgcagtggctcttaaagcttcagctcaagagctgctcacatcacttccactcacacgctgttggccagacaagtcacctggtcaagccagctgctagtggtgtggaggaggaaaataaataaccctaaaggaagagaggaggagcacaaaattggaaactatatgacaaggcgctgtgtccaacagtcattgcattaacgatacactacagaagtatttgacttaggtgattctttccaacactgagattctagaattctattaggtgaacccattagatcacatggtctattcatgtggtttttcagaacacacacattaacaatttctaaccatagaattcaaatgataaatgtaaaaatgggtaacgaatatatgggccaattggagacggtttaaaatagcaaattagggcatacgaaagaatgaattcattaatgtaacattcaggacaaggcaaaagtagagggatgacaagcagatcagtggttgctgaagtgggggacaggtgaatttaaaggagtacaagggaatttgggggctgatgcaactgttctctgtctagatcgtggtgatggttcactatttgtgtttgtcaaatttgtacaaaaagggggaattttatggtatacaaaatatgtttcagtttttccccaaaaggagaaaatataagtgaatgctctagggcttcacaaaataccaactttctttaaaacataaaaaaagtttaaatacaaaactgctaatgaaattgaaactaggaaaatctttatggaaatgggagactcaggttccccattaaacagtgttgtttgctcagtttctcagatacagaagctgacagtaaaataatcaagacttcagatgcctgtaatttgatcccaattgtttaaaggaagccccctccccacccacacacacacccacagagagagggaggaaatgataaaagataaatactgtatataacaaagtattactggtaggtgccagacaatgagaaattcttatattaataggttttattttgaaatccgaatactttctattcattaaggtggaaggccatatccacaacataattactagtgttgccaaggttcggtttatgggtctgctgtcttgaccttctaaccaccttctttaaaaaagcaactctcaacacaaagtgcattaattctcagattaaaaagaatacaaccgcaaagcaattctatgcattcattatgtatgaacagtatttaatattaataaaattgtctttaaatgtgcttgattttgttgatcgaaggagaaattgctggcagggagtgggtgggtggggatggaaatatgtgctaaaccttctggtaccattcttgaggaagacaagtaggtggccagatgcaccactttttcttgtgatttaattttgtgctattctagtgatgaccacactcagaaagttgcatctccgctgacatcatgaacttgacagcagagatccgttaccactcacagaaaagggccatgcagtacctgccacagaaatgagaagaaaggactttggttcttagtatgcaatgatacgtggcttgctgtcacaaagctcaatattgaaaatacctagtgcataaattcatattcacagtgttattgagaagagcttcacaagacacgccatacaataataccaaatccaccataaagaagttatgaaaagtagttgcaatgtgtcttactttggcagtttttcaaacctctgtatctctgaggctttagactttttatttaaaatacctggagagcctgttctgtagtacattatccttgaagcgggtgtcactgaggcactggggcatggattaaactggaagcacatgaatgaggagtatgactagtatactgcgtatttaagagatactgtcaatggaataaagcattgtcaaaggataatggtttccagctgccacataaatgtcaaagcaaagccaaagcatttattttcaaagcaaaatgcaggaaagtaatgtgatccccagtttgcacataataaggctgtaaatcagggcttctgatggaacctagcaatgattctacactaggatgtgcaaactagattagattccaagccagccatccgagttggcaaaagtgagtagctcttttccaagatggctgccactagactgtcactgatgcctaaaaaaggaaaagactgtgtttgaaattcacaatctcactccattaccatggatggaagggaagcaggtttacttgctcacttctcttctggaaccaaaattcagagaatttctccatctgagggaagtgtggggacagagagtgggggggttattgaaaataagaaaatcggagacagttcccaattattcttggcccactgtttagagaatggagagctaatgctctccaagaaaaccgtatcttctcttacgtgtgtaattcttgcagggtagattcctagtgagaggtcacagctattatttctcagctccctctcgggaaaagctaaacttcatttcctcctatgaattgtgcccaaagattggttgatcgatttcacaaatacttactaagcatctgctatttgccaggcactatagtaggcactccaatctagttaggaaaccattgcaggaatccaaggagaagaggtcctggtggcaatgatggagagcaggggactgatttaggaggcgttaacaaggtgggtttgataagacttggtgatgggttaaatgtagagggataagaggaaagagagaggagatccctactttaagctgaccatgattcgttcaaatttgctgtagaatactgagatggagataccactagccagttagtaatacctagatctagaactcagaaaaagatttatactagagaaaaccagtgactgaagaaaccatgactgaagctagggagggaagagatttctgggggagaagaggttagggaaggagcaccattcttcaagccctggaagaggaagggacaggcacaatggaggctaaggaagcgttttcaacttgtctaatcgttgtgcaccaggttatgtggggctcctgtagatacctcttgcgtttgaattctctttcatggacataatctccgcattaatgtgggtctttttgattgttgcttaccccttatttagccggaatgcaacaagaaggagccccccaaaaaagtatgtcagtttgctttttaatcttctaaggatttgccaggtttccatgtataaagaagctattttaagagcgtctacataaaagtttcaacagtgtttgctcttttgctgaaaagtaactcaactgaattaaatctattatttaaaaaacgtagttgtagccttaaaatctgaaaatgaaaatgtttgagtccttttttcccttcctttcttctttttaaagaacctttgggtcatgcctgctgtcctcatgtagggcagtggaaatggcaccattatgtttagatctggtgctatagggaaggatatttgtgcttgtaaaaactgtggtttaaataacacagttttaattttctgaaacaatttcccttgaaaactatattttattaatattgtaagcaaacgtaatctctgaaaaatacttggctccacgttaaccttttactttggtttagtgttatctcctcccaactgtgcttaccaagtttatagccaaaactaaaaaaataaaaaagaacacagtatgtttgtcatttgtcactggattaggattagcgcaaatatacaggtccattaacacatttttatgcatctcagttcccttgtgtggcattattttagaaattcttagcagaacatatatatatatacaacatttgacataagataatttgattttgctgtgcttggaaaataactcacacgggagaaagttgcattaaataaataatagagataaaatttatacttccatatatttcaaagttaatgctgctaacttgcaatagaatggtaacatgaagacacagtgctataatttgattgatttgttttgacagcagccaaataattgagagtgaaaggtgtcagcacagatgaaatattgtataagccacattcagaaggcaaccccagcagcagccgcgactggagttttatttcctttgatttggttctgttactcacttccagtttattatgaaaccgtgaaaggtgtgccacttccccaactagggagacttttatggaaagaatagaaataggagtttgtcaaatagctgaacaatggttatagacaaaagaatctaagatggcagtagcataccaagctaaattatatcagtctctctctttcttttgcaacttgatgccctagtacattttgtctcattgtgaagtgattctgagtcaaagcattttccagccccttgacaagagatgggggaaaaagaggggtgtacttggcaccatctctgggaccagataaggcatttatgcaaccgaaaacccgagcacctggtaagaataagatctgagatgtttagttaatacagaagctacatggtcaggagaggatcagttaggacaaagactctgcactcaggcaaacatggatcatggtaattaatagagtggcctgtgaatcacactgaccagatttacttccagcccttctgcttgctggctatgtagcctagacaaggcactctgatttctgagatttgctttgcttgtctattttttagggttgttttaaaagttaaatgtgatactatatggaacatacctagcatggtgcctgatacttagtaagtgcacaatgaatgatggctacttttgttatttagagctgcaaaatccaatatggtagccatgagccacacatggctattgggcatttaaaatgtggataattgaaactgagatatgctgtaagtgtaaaattcacacaaatgcaaaatatctcatgaatatttatatattgataatgtgttgaaatgatattttggatatattgagttaaatacaatatcttattaaaaataatttcagctttaaatttttttaaaatatggacaccagaaaattttaaattgcatgggtggctcccatttgcagcttacattatgtttctcttgggcaacacaggcctagaggatctgcctatacaaatggcactggttaaaagctatgttcattaaaaataaaaataacaggtacatgtaaattgtggaccttcaagcagaaaatcacaaaggatccactttggtaacacaaattagagacaacacattttgtaggctctctgccatagtataggaactacttgggatgcagttttatgcgcaatttccattgatcagaatctaaaattctctctctctcttttttttttttttttttttttttgagacagtgtctcgctctgtcctccagactggagtgcggtggcatgatctcagctcactgcaacctccactgcccaggttcaagcaattctcctgccttagcctccccagtagctaggattacaggtgtgtgccaccacacctaatttttgtatttttagtagagaccggggtttcaccatgttggccaggctggtctcgaactcctaacctcagtgatccactcacctcggccttccaaagtgctgggattacaagtgtgagccatcgcacctggcctaaaaatgatcttgtctttttaaaaattagtacgctttttactgtgaaatatagagaaattatgtgcttcaactgtatttgtaatattttacaaaaacaatataaagcaagaaggacaaaatgttagaatttgtgagaacagtgtgatgagtacacaggccctctgtatgttattcattatagttgtctttatggtttaaatattttaaaataaaaaacattaaaacgttttaaaatgctccttaagaattatccttctatatccttaataaattaacaaataagctatatttttttctgggattaaaaaaaagtcttaactcatttgcaatctctgttagttacttattttcaccaccaaaagttagctgaataaaagcctaggcatccacacagaatttggtttgtttaaaaagaaccataggcaatgctgtcactaaagaatgtttcagagggaatgctagaccacaacatcagacatatttgcaaggggcctgttgctttcttttgctaaaagcttccaataattccacaaagggtatttgcagatttctgaaagttccagaaaaaaaattaaatgaactaccaaattcagttgaatgcttgaaaattttaggagttatctatttgctaaggatccattattcagtctggtctagttagagaagttgacaaaaggaagagaagagactttccatggcaaaattggagtaaaatatacctaacataaaatttatcatcttaaccatttttaagtgtacagttctgtggcaccaagtacatttacatttctgtgcaatcatcatcaccatccatctctctagaactttttcatcctccccagctgaaactctgtacccattaaaacacaactccccatccccctcccccagtccctggcaaccaccattctactttctgtctctatgaatttgaccactctgggtacctcatagaagtggaatcatatagtattcgtccttttgtaactggcttgttttgcttagcataatgttttcaaggttcattcatgttgtagcatatgtcagaattgtcttctttttgaagactaaataatattccattgtatgtatagctactcatctgtggaatggacacttgtgttgtttccactatttgactattgtggatgatgctgctacaaacatgggtgtagaaatatctatttgtatcagctttcaattgtttggggtatatacccagaagaggaatgctagatcatacggtaattctacatctaatcatttggcgagttgccatactattttccatagcagctgtgccattttacattcccaccaacagtgcacaaggatgccagtttctccacatccttaacaacatttacaattttctgaagttttttggtttgttttggaggcttcttgttttgttttgttttatagtagctatcctgttgggtgtgaagtgatatctcattatggttgaaggagcatttttgagagaacagttacttactgacttctcctaatatggcttaatcacattcaagtatgatatcaaatattaaaataacctgaggagaaggcacgcttcagaagttgtgttacttctgctttgtgcccttcaaattgtaaatatcatcattacggtatttatataattgcagttggatttacactttaggtatatacaactgtgttatatatgcaggtggatactcacgtgaaagaacatttctttttaccatgaaagaaattcttgcaatgcaaatcctctttttctattgaactccaatacagttaaaggctacactggacaacaaataaaatacttagagatttgaggaaatttttccttaaagattttcaagttgtgacttgctcagtaaaatcctgactgttggaattcaacagaggacctaaacaatcatcctgtttttctttgcagcatttttccccaaccttgaaatcttccctacctttgagagctatctaaatcccttcctgaatcacaagaatttcttccatgccagagtattgccttattttctgctttgaatgtcaagaacgtgtctgccatattcatgctttagcctagtgggagctactctctcatcagtttgaagtataatgtttacttttctagtaaattttctattctaactcttgttttactctagccttaatttttgtagttaaagccttcaagttatagtaacaaaattaagttggttcttcacttgagcacttctatccaatcctatatatctattagacatttttggtgtattttgtgtttagagttttcacatgcaatagatgattttgtttaagtcaagtgtgatgtgcagttagtagagctgcacttcaccagcaagcgtttgacatttatatcatctgtacaggctgccccatactctagccacaaatagaatgcaggataaggtagccaggtcacctcaaaagaaaagaattggtgtacaaaagcccctcaaaatcataaagtcactggtgctcataaaatgatattgcatactttttcaggagattaatgaatgggtcataaaataacattaattttttggccaacttccagccagaaagttgtgtgtttcctaggtagtacttttccaactgcgaaagcctggctctgagaatatttgcatttcaaatcattaatgctcttgcatttcttcacttaaaaccaaaaaaaaaaaaaagaggaaataaagctattgaaaccccaaactgctccagcatttctgcccaggttatgtcttgggcagttatgtcttcttagctaaattctccaagtctttggaaatgaggatgaggcagttggagcagaatgctactgagagttcagtgggtccacgttcaggggttccactccctcaacacacatcttagaaccaccaatgactgctttactttacgccagttagcaaacttgaaaatttatttattggtcaaaagggtgataatattatgaaatacaggcagaaaaaaagcaaaaacaatcactgctactagaagaaaaacaattaccccacaccagttgatcagcctcatgaatgtctgtaatgactgacagcacattcattcacacagtgggcacagaaaaaggacatgcctatttcccaccacagcttttccagaattctggagggcccctcagcagatgtgactgagtctgtaagtgaaagtttctctctgaaacctgggacagccttgtcagtgcttgcctcttgaatgttccagaatatcatatgaccatgtgatttactgatttgcagccagctgccaactgttttttaagatggagaactccaaccacttctcacttgaaatatttcaatattgtgttcacatagaaataccatttatgaatgaattaaaaaacaaaaacctcaaaccactttgaatttcatagactcttgggagaaatcaggaatgttatcaaacataaacatctatttaattcaaaatagcattaaaataataaactttcttttttttttgagacagtgtctcactctgtcaaccaggctggagtgcagtggtgccatcttggctcacttcaacctctgcctcctgggttcaagtgtaaaataataagcttttaattaaggagctaaagctcgaaaagagggctgttttataatacattttttttggttcctaactgcccaactttcccctaacttaaagttgttttaatcaggctatgttgaactctcataacaaaagcacaagattaccttttctaactgaatatttctgaaaaattctcagtgtactggggttgaatttcttcatcccctaccaaagggaaacctggatttcgaagcatgttaccttttctgtctgaatatttctgaagaattctcaatgtactggggttgaatttcttcaccccccaccaaagggaaacatggatttcaaagcatgttcccatgaagggaaaaattccacatccacgacattcatagaattatcaggtataaaagagactttgtctaaaatttgatctataattttctcttaaaaactaaatgatatagccacatgctgtgtatgtaatagatgtatgtgaatgtgcgtgtgttcttcagcaaaactgttgtactttatgcaggtataaaatgttgccatattcgttaattttgtcataacaaatgtttgaccacatgtgatttcatgccataaaaacacacccgcgtttttgggggaaaatagaatgcttcaggtctcatgccaggttttaatgtagaattaattcctttaaaaaaaaaaggttgtttttttttaaaaaaaaccaacatttttctaatgtacattaaggatgttggagaattcactgaagcatatgttctgagctttcgggagcaatctgtagtcaggcattttaaatgaaaattgatttgtgatttacatggtcagtggaaagaaaattaacttatggaaggttgtaatgaaatattagacaagtaaaaaagtagatggtgatctagtggaactaaaagtcccatctggaagaattctgtgacatttttacatttatctgtgttctgcatgagttgtaatgttagtggtaattttatgggactgaactgaaatgaaaagggtgttatcacagattgcctacaatataggattgtgttcagtggagaggcctgtatccttttctccattttcctataatatgactcattgcacttttttcagctactgttgttgaatgcattcagccttttacttgaggttattagaagaacatcaaatgctcacaaatacaatctaaccacacatttaaaagcaacacagaagcttctccttagttcttcattgtttaggtaatgtctaagaaagaccctttaaaatgtacatgaaagaagcaagtgcattgaatgtaaagctttcactttaaaccatttttttgtttgtttcaaaagtatgattaacacctcaccaaaaacctagaacatgttagcagtatggtaaatttatatcttcctgaaagtaggtcattcagaagttgcccatttttctccctttttattccaattttgtaaaagtactcataattgtttccatgatcagagaagagtgttctaggaaagaaaggccaagactcttccttttctgtttgataaaaaataaatacctatcatatttcaatagtaatgagctgatgtgaattttgaacgggaatgagttgcgggcttaatttcacatgctattcttcttccctttacactgactatttttgacagatggtcacgactttttgaaatatatcacttctaaattattgtgccttaaatatttgataaaatgtaaatactttgaccttgtactaaagcataagctgtgaaattatttgccttcgaatttcaaaatccattttctgtctcttttcttttccctgctttcatctcttcctccatgaaccacagctgaatataggtagaacttctaaaaattctaactattaaggtctttggctaaattgttacttgtactatatttaaataaatccactaaatgtgagaaatcttacttttaggatagattgcttagaacgtcctcttttattttcctttttttttccatcgagttttgttcttttgtgaagttttctcgtctttatttttctattttctctaataagaaaagtgctagtcatttcaggaagttaaaattgtatcatgttgatttcaaccagagtggcagcttcctagctctgtaactacagaggtgcttctcaggtggggctgcccatgtagcatcacctgggctttgtaaaaaagagcaactcctaggccccttcatggagttctgatgtaatgaatctgaggtacctcgtgacattggtacctttttttttttttttttttttgagacggagtctcgctctgtcacccaggctggagtgcagtggcgcgatctcagctcactgcaacctctgccacccgggttcacgccattctcctgcctcagcctcccgagtagctggggctacaggcatccgccaccacgcttggctaattttgttttgtatttttagtagatacggggtttcactgtgttagcgaggatggtctcgatcttctgacctcatgatctgcctgcctcggcctcccaaagtgctgggattacaggcatgagccaccgtgcccggcaacattggtacctttaaaaaactccctggttgagtgtcctgtgcagccagggttgagaccacagctctgtaagagcaggtggtagggaaaccctttgtgaagttgctctattttaggtgaggaagggaaggagagaggacggggttggtgggcctggattcatccctgccttaccagaagacacaactctactcttcctctatgcagcttttacattctaggaatagttgtttgactcacaatatctggatttgtgtctttgacctaaatacacatacacaaataggttataggagaattatgcattatttatttaattgcattttcaaatcaccggctcaaaatatatactttgagtccattgtttttgtgtaggtttgatgacttgaattgagatttctatcccaatttaatataaaatattttaaaactttttcctgagagctggctagaaatgtctgtttttgtaggcagaggatggcctattgacgccatccttttgacttggttttttgttgttttcttgaagtagaaagcacatagccctcccaccaaaacgtcctctaacgtcaaaacccaaggctgtagctgtgggtgctgatgtagcatttaagcaaccatttgacatccatccctcctgtcatttctgctgcatattcggttcataacatttctagggaaaaggtcacggatctgtcaccagcagtgtttgtggcactcagaaaataaagcggggtggttaatgatagctgggacagcccatgtaatcacaggatgccgccgaggtcaatattccttattggctttccatcctgtccatctgaaacaatatactggagtaaatgtaatcagtaagtagtcgcaaatgaatcttttggagacatcagcattacagaaacaagagattcaagaagagatgctaagtggaaccttttgggttgtaattgcagccctgggaataattaccttaattaatagctgctaaacctgggacccttgctcccaggctcatggatgagtttgcaattgctgttctgggaatgtctttcgggctctgcagaaagtgtcaatggggtaaacacactctggggaccaggcttaggcactgagagcctcctggccccattttttcctcaccacaagtacatccctgctgatcagatagccatctccatagaccacaaagtagtgagccatggttgtggaattggatgaggagatccatttcagcaccaagttcctgtttagtcaagagagccttaaatgcatgctgtttccagtggattgatggctctggttagaaaacagcagccctcttgacatttgcctgtgaatacataaagagctcaagaaagagaaaacaatagggcagcatttgtttgcgcatcctccagccccacttcagtaggctgtctttaagagctggcaagcttgtctgaaggatcagccacaggcaaaattgtggtttgtttcccgacctcggactttcctttgccctcattagcaatgctccctctctccccttctcatctggcatcaactgtctgggccattctgccttctctccttggtctaaacctcctctagagaaaagtcccaatgcacttgctcatcccgaggtttaatttcccaacaatgattccagaaacacgtacaggaaagcagcagcttgggccagccatcaggtaactggatttgggaattatttaggaaaagagaaaaacctcctccccctcatacccttatcctatagcctatatgacttcactagtaagatactagtttgtgagacactgatgttaaagttttctcagtaatgatccaaatattacctacacaaaagattccattcacatggaaagtgtgttaaagaaacaggcaggtatctcttaacagcaataagtctctccatttactttgcaatctttgccctaaacaatgtgtgtaatcctggacattgggattgggagacaaggggagatactaactgacgttttgaggatctcgatgttcgtgtgtggactcacatgcagctcacgtttattgagcacatactaaattctgagcactctcaaaactcatctcacttacttgccacaggcaccctgtccaggcattatcctcctcactgttcgtggtagtcaaccaaggcacagatgcgattaagagatttttccaaaataataaaactaggaagcagtggagtccaagtttgaacttgggctgtctggcagagatgccctgtcccttccattgctccagtaactgggaatcaggtttacctgctactggtttggaacatttaaagtggctcccacaagatctacaagaagttcaaggtaggccaggcatggtggctcatgcctgtaatcccagcattttgggaggctgagacaggaggattcctcgaggccagagtccaagaccaacctgagcaacatagtgagaccctgtctctaccaaaaattaaaaaaaaaaatttagctgggtgtagtggtgcatgcctatagcctcagctattttggagactgaggcaaaggaccacatgagcccaggaattcgaggctgcagtgagctatgatcacaccactacactccagcctgggtgacagcataagaccctgttttaaaaagaaaaaaaaaaaaaaagttcaagatagcatggtttgattacaaaattttggtatgctgagatagtaatacttgctcaataaaaccagatgaattgattaactggaacaacctcatgcctctaaatacgtctccttcccatagcaatagaagaatttgcaggtaaatctagaaagggggaaaatcataaagggcccaacagaaatatcagaattgatacaaatagtttctgccattcttaaaatgaataagtgaagggagaatgccagttagtactggtcaatatactcaatatatagacacacacttttctgtgtctgatgaatgtcattactaaaattttaattagaatacaagcccccccaatgcatcccaaatagatttgtgtgctaatggggtcagaaggtgctagacaaagaataagcacagtagttttcaactgggggtgagtcttcccctactcccccagggtcacttggcaatgtctggaagcactttttgttgttgtaattggtggtggtggtgctactggcatctagagggtagagaccagtgatgcagctaaataccctgtgaggcacaggacaacatcaaaacaaaaaattatctagccccaaatgtcaattgtgctgagattgagaaaccttggatcaaagaactaatgttgagggtgaaaaaataacaaagggtaaagaagcctaattgactttacaatctgaaagtgtaagtgtgttctggctagaaattgtgataagaaaagcatcttaatattgttagcatgactgaaaaattatttcagtattcttcacagtctaatgggattgaccttatgataaattttaagcagggatggaattaacttccaggaaaacagcaatgataataggtagcagtttttgacccctacggcatgccaggcatttactatatgctttattgacatcatatttaatcatcacaactctatgaaatatatataattatacccttttatatatgattaaaaaattgctataagagattaagtggtatggcagagatatttctgttctgatcacttcatttccttttcctgattgacacatagaccctattttccatcctttcttagagttaagcgggtctctatgactgatcctggccaatagaatgtgggtacaatacgatatgttcttccagaactggctcctaaaaattccttctattcaatcccctgcatgttctctcttccttcggatccagtggcggactcaggggtcctagggaatagcctggatccctgaatgactgtgtgcgccccactggccctcgctggacatagatgtgaaagaaaaaaaaattattgtatttatctactaaaagttggggttgtttcttggagcagttgaaatgccctaattaatacatggggctttaaataagctggaatttgaatctatgtttttctaatcccagagcccctgtccatgatgactacattgtgttacgaataaatgattataagccatttcaaaacaagtacaaattattttcaagaaacagttgtaaaaagatgtctataattttccctgcatttcttctagatagaaaagtcaaagtataaaattatcattgaattttctcattatagagatataaattgatacaaatatgtccctgaagtatataaatattcaacaattttagaagcagataaaaatgtatgatgtttatgattacatgtgaatagatgctattctttacatgttcttctgatattaactagatgtttgttagctgttcttctttccaagcacaaaggacaagtaaatagataacaaaaggtttttaggaaaaaaaaaatggagagaagataaccaagtgctgcttacctgtttctattccaaaccaaaataaaacactgactcttgatgaatgatcaaagttatcaactagaaagacaatcattttacttccaaggaggagaacaaaggaggtgtctctaaaaagactatcactcatggtcactaggttgagaaccctttaatagaaaacatccaattttttaagaatgtgtgtagctccctccagcatatagacggtattcaaatacttactaaattaatctgaatatttatattattgcagttagaagatctaaccagaatgaatacatactgaatttgttggtaggtttcctttaacttcttgctaccaatgattttattgaactcaacatatcaagcaaatattattgcagtggcaatcatttaatgttgccatgacatgctaagatcagaagtagttatggcccatgtcgtttgcctgaactaatgcacatgctaaaggcaaggaatcttctgatttgggatcaatttccatggcattaaactaaggacttgcccatgaaatgaagttttgtgctctctcaaggacatctacagaatttgactctgtgtgtaatatatttccattctctccaggactattccttggtttttaagcttttaagcttattgtcaacaatattttagcttatttagatcacattgtagcatattatatattttaaatgttttctgacaaattacgtgcaatttattaattaattcatttatttatcaggtgttttattaaccacttatcctatgctgtgctcaggtataccagttgtctggaacctcagcccacattctcaatattatattctagtgtgagtaatacagaggtcatagtttagtgaggaaggtagacctgaaaacaggtaatttgcaaaataatttgatagaatattgtaaaataagaactaaagaaatagtggtattatctgttttaccaaaaaaaaaaaaaaattctgctaagtagtatccagtctgaatttagcatttggcttttctcaacattatcactagctgccttattaattaagtaattaaggtgccaatattatcaataatttaattaataactattttagaaataagatactgcaaagcttcttgcattgctacattctcattctctgggacttgtaggaagggtctgtcccgaggctgatctacttccctccctcccagcacataggaggaatcctgtccggagggctagaggatgatgatctgggttatggcaaagtggaattaggacctgggtttcttcatctcttcccaggctccctccacatggctgcactactaatgccactggccagagtcctgtgattgttagcggacccccagagaaagccagcatgtgaatgccaccccccaacacacaatatgtacacattaccgaacttcctggtaactcattttctccagcatagcagagtctttcagaaagtgtaaaacccggtcactttaattatatcaatccatctgcgtggttgtcctcctcttgtgttttccgggcttctggttgtgaaatcagagcatggggatatttcctctgaggcttttcattaaatggtattcggcgcagagaaaggcattgctgaatctttaatgttctgctaccaatagtcatgtgggccttctatcctgcttgttttaacataaattttatggaaactacatctttggcacgcatatgctaagcatacagcactataagagccccattttgtagacaatcagcccaggatattgtaatccctctgttagataaaatgcatgtttcccttttaatgataaatcagtctgttcaagtattgaataagatggtacccttgggagtctttatgattaaaattagattattaagggaaaaaaaggactctgaatggaaatattttctggcctctgattggcacttggatgctttcagtactgcctggttgagcagctgtcactgtattcttacaaagtgacagtcccctactctccccaaccctgtcccagagaacacggtagacatggtgcctcctggtattgtgcagtgctgaggccctgagtgctcttaagccttagactctatgagttttgacctgcagaaagttaatatcaatgagttattggatttagtgattttttttttcaggtgaagacaaaatgcagccatgttgctgtgtgtttatctctgggaaggagacaaagtaaaggaacaagatcacagtgtgatccttctggaaactcacctctcttttgtgttttgtttgtctattggctgcttcatatgcaacctatctctaggtgcaaaagcatcttttgttccaatgattccactgaccccctcttcataggagcgaactactattttatagggactgttagaaattcattttctactaatgtcaattttcttgccaacacactggatttctcatgcatcaatagtaccattgttccatttttgttacattctgctataatgttattctagaagtaaaactatccagatagggcatcaaaataattcttttgccagactgctaactgagtgaaattctcttaggcattcctccctaggcgtggctttctccctatgttcagaagccatttctttcactctaatgcaacagaacaagtgccttcccactttcagtttatgcgtttgtagcgccttgtagattctgtctctgctgtctttaggatgctaaactctacaccaccaaggtgctttggggtcagccccttatgttccaggatttgctacttttaccttcttaattaatattacaccatcttttcctttccttgctgtgtaactacctgctgctcacatgctcatcttcttagtagcctgcctttgcctgacccagatctacagccactcatttttagaaaaggaaaaggaggcaacaaaggcagcataatagatgtatctgggcagatcataataaaaatagctcctgaatatcaagtactgtggttagaacttttcatattattatctcatttatacacataatgattttatgaggtagttgttatcatctccatttcgcttgtttaaggtcacacacctggtaattggtggtgctgagatgaaagccaaggtctccctgccttcaccaccgggccaccctgccccttctcctgccagtccactgggctttctcccctgagagtcaaagtttcagcctgtttcccctctgaggtccttggtgttgacaagacctcagtctagatcagattgcattttatccctttactctctgtgccttgtatcccctgagctttttaacatatggggagcccttccttagaatagctgtcacctaggcgtattgtaatttatacctattgacactatgctgcagataattcacctttgcaaactgtcactttccaccgtcaccagaagtagctagcaaacggaaatcatatgcatggtgcccatcaacagaggaccttggtgtcacttgatgcaaacacatgtgggggaaaatgagcctgtacctcctggatcacacagatgtcttctttccaatcgagagcatcatttgatgactttgaaggagccagaagatgagataaataactcctaagatatgatcattattgaaatagattactgaacaggtgcgtctgcattttctggaacgtctctggagtagatcttttattctttggttaagtagcaaaatgcaattgcaacattttcccaagaaactattaatataatacatattgaaaaccaaactgcactcaccacttcctttgaggactcaaaggtaagactcagagaaccacggaattttctttaaatagaacacacttcagaaattatttgtccccaccttctacatcacagctaaagaaattgaggtacagaaatattaatggatgcattcaaggttaaacacagtgatgagtactctgagaatataactaagcgcctctaaaattaatatcatagcacttatatacatttcagtacctgtcatttttctctgcttccatggcattggtaataatggaaacgtattcctgccttcagattgtgtttgcattttttttctcatctttgtggtttgaaatagttaaagcatcagccccaaccaatatgcacttgaatttgaaatttgctgtatgatgctgccgcttttcattttttaccatttcacaccttgtccgcatcttgagcaagcttgtaagtttccagtgcatacatttcttgtgatgatatattgtcctggtggaaaatttcatttactggctgtgccctttgctgaacctgttgctagtcagggaacatgataagcgtataagtagcatgctacttcatttatcatacatcgttttagacactcaaatatctcatatacaattctgcattctgcacaaagggaaactacccaactcacagaaaaaaaaagatcttcaagtaaattgtcactttatgatacacaaatgtatcctcttaacaaaaattaatcgtagtttatactaaaactgtaagtatcctttattttttataaaactgctaaccacatgctatcaaacatgaataggaagatcttggcttttgtgatttggtgtataagagaattggaagatataaagacgctattttcaataactggatcacattgtgaaataaatcagggtattgggaatcccagcagtgtctcaggggccgtctggtgctacactcctcacacacagaagcacttcaacattttcctccttttgccttgagggaaaacagccctaagtcagagccaacacttgcagaagcctgaatgaagctggagagagaaggcgcatcagcaaatggaaaaccaaggaaaacaaagctctaagcgtgtgcttggaaagtcttctttttaaaagggttattttcctaggctgctccaggatgctgggcctacctaatttcagtaacttttcctctattgatttctgcttttcccctgcctgtcaatgcaatgttttactagcacccatgttttatgtgtagcattaaaaaatctacattctgtcagaatggggcccttgaaattttgaaagtgaaacttgatttacattaaacactgcttagactaattaggacctttctcaaaggaattgtgaacatgaaatacagctaacaattacgtgttcgctgtgtccctttctttatggtccaggaagtactttagctgagtggaacccatagacagataagagctatggacacttgtagaaaggtgtccatagatggaggcctggacatttttatccatataggactactgcccctcagaaacaacagttagtgtatttcaacatggtgcatttcagcagcaactcacttctatacctgtaaatacgactcagctagacccggccttgcagggggcacccatacaaaagggaagagcctctcaaatgaaaactcacttttaaacatttttttttaataaaaaagcatgtccctttctgaaatgcgggattgggatgcagaatttaaatgtaacattacttctggccactgtgaaaaagcccttactaaatatacagcaacaaaccatttggttttctccatttctcgtgttgatggaactctctctaggccctggttgttcttgctctttgaatcgcagtctttgagatgtgaatgaaagctgtggatcttccctacagaaaaaagcgcacatcccctgaaagacacagatgtctgcatgtaatttcaggggggtataaatactctgaggttcgctcacgggtccctaaatgtgcatggaaagagcactggattcaaatcaccagttacaaactgaggcagtttattaagcctctctaaactcagtttgagcatctgtaaaatgagcacaaagatagtactcgccaagtgggctgcagcggagattagagacaatgaacatataaggacaaacgccgcctgacacatggtagttgcttcgccagtgtctgtttcctctccctccttagactaacttaccagaaagcaaagtcatcaactagaaaacagggcttggcaaacttcagtctgccggcggaatctcatctaccacctgtttttctagataaagctttactggaatacagccacatccatttgtttacgtattgtttgcggctgcttttgtgctacaatggcagagttgaatagttgtaacaaagattatgtggctcgcaaaaccaaaaataattgccatctggccttttccggaaaaagtttgccaacacttgctctatagctcttaatccaagtcaacagcatttgcaggcagttcccttcctcctgattggaggcatctgtttattgctattgtgaccatgccctgtttggaggttggatctgaggtagatactgacagttgttggcagcaaggtctgatagtgaagactccagctccaaattggaatcaattcaaatgtctatcaagaggaaaatgggtgaatacgttgtggtgtagtatttgtgcagtcaaagagtacagtaataaaaagaatgagctattgctacacacagaaacgtgggaccagcaaagaaaactgaacatagaagggtacataatgtacggtcacatttatatgttcttagaacatataaaactaactcttggtgatgcaagtcagagtagggagggaaacctctgggctgttgaagcattctatacctccattacttagcacaagatggtaattacatatgtagacatttttgagctatatatttaaaattaatgtactttctgcacttgggaggttgtatctgaagtggaataatatgaaagacagagagacagagaagagaatgctctgggctgaggctgtcaagggtcagatcctgattttccaccactgactagtgataagacttgggacagctgtcttcatagtgcctcagtttcctcaatgtagaatggccaaatggttgagtaggtttaaatttccttatctacaattccaaaatccaaaaaaatctctgaaaagcgaaggtgttttcataactgatttagcagcacgactgaccttaacttgtatcagaatatttatggtttttatttatcccacttagtatgaaaagtcataggtcttgttgcagaaatattaatgtgcttcattgtggaatgctgctacagatgatactgggagtattattaatatgtggtatatgttttccatattaattttctaaaatattaaaaattctgaatccaaaatttctggaccaagatcattagggaagggattgtggacttatatctgcctcatggagtttatgaggattaaataaaattacaactgaagagcacttagaacaatgcctgtctcatgcaaagcacttaacgaagactaatattattaattgtgatttctgctcccactccaaggaagtgtatgacaactgttttccttagggccagatgacactaattatggaaactatcaggagtcaaatttctaaagacagtagcctataaaccttcccttgagcaaacttcatgacaaagaggtggaaaactgtggcttcataaagggggcaaagtcctgaattatcactcaggataacttcacaaatgggactatcttatgagaggctgttttctgtcacatctccaagtagacacttccactatgatgagaaactgctaagtattcttaaacagaatatgagggtttctttgaaggaccaggaaaggagttttatttagtgctgattctacctgagttttaaaaatactccatttccagcattcctgctgggctgtgtgtatttgaagcattctactgaaaggacccctctgtctctgacatctttgtttgtaccggaattaaggtggccatgtgcaaggaaattaccccaaatcgggacaaggaaaggaaaaattaagggagaagcaagtcacataaatgatccttcaaaaggatgttgtgtctaaaaataatctaaagaactttatggaaagggcagtggctctgagtaccaaattctggttcttacatctgccactacttgctgggtgaccttagacaaaccacagaatccctttgtgcctcagtttcctcatttgtaaatcgaaagggccttataaatggaaagttgatttctaatatgcctctcaattctgtgaattctaactgccccaattttgtaaggccagaaaccagttcctaccaatcaactcaaactcctgcataagaccggaggaatctacagaatgagaaactttacaaaatgcttattgatttaaaatacaaccttgttttgtttactctggcatccccagtatctaaaatagcaactggcacaaagtaggtactaaaaaagtattgctgcatgaaagaatgactattttaataatagatctgttactgagacaataatagtttctttgataaataaatactaatgaagtttttgttatttaatgactcttgcgagtaaaagatatgatattttcagccatacagaaaatcgcagctcaaaattatttaccaggaaaatgtctcatctcatatgttaagaattcaaaagggagacagcatctttattggctcatttattggcatttttattggctcaacagtgtcactaaagacctaggtttcttccttcctctgcccaccttcttgggcatattaactttcttgcagctgactcaccttgtggttgccaaacagctgctgcatttgcaacatcatgtaaccttctcccttccccgcaagacttcagcagacttctcacttcttattggctggaattaggtcgcatgcgtactcttaacctattcctggcaagaggtctgggatatgtaattgtcttaggtagtttaggagaaatgggtatgttccctgaacaaaatcaaggttttcttagaaagaaggaggcagaggaatagatttacataatcaatggagagtgattgctccagaattaaatatctgtttaataaatagctgttcaataagtaaaagaaagaatgaatgaatatagaaacaaatggcatcaagataaaaagtcagatgttaaaatgccaaatggatgatccaaagattaagtgacagagggattttctgaagatgtcactgtgtgctggtgtggtgaaggtgtcactcggatagtggcacatggcctgaacttggatggtctggatatgggtgaagagctggtgaaggcatttcatttgtggggagagtttgatccaatgaagggaagtagaaacatatataacatgtattcgtaggaagagagacactgaatgaagagaggagaggtcagtaggggacagttattaaggatcagtttggaaaaataaatttttataacttggctctttgattaggccttattctattggtaatgggaagtatttttttagttaaatgtgttgagctatactttacataaagcaaaatccactcttttcagtatacagttccatgagttttgacaaacacacacagttggtgtaactgtgatacaagatagagacaaattcctcaaatattttctcatcccctttgtaattaactcttccttgaccaccagcctgagtgaccactgatctgttttctgtctctatagttttgcctttttctgaacgtcatgtgtagccttttgagtctagctgctttcccttaaaatacatatttgagattcatctatgttgtatgtaacaggttagttcctttttctgtgagtaaggtttcactgtgtggatataccacagtttgttaatccatttgccagttgaaggatatttagatggtttcccttttattttggcaatgataaacccactgtaaacgtttgcatataggtttttctgtgaacataaatttttatttattttgggtaaatacttaggagtggaattcctgggttatatggtaagtgtgtgttaactgccaaacagctttcaaaagtggttgtgctgctttgcaatcccaccggcagggtatgagcattctagttcctccacatcctgtcagcacttcatgttgtcagtttttgttttgcttttttttttttcttttcttgtctttagtttagccatcgcactaagcatctattggctttaactttcatttctctaatgactaataatgttgaccatttttcttgtacttatttgtctactctgtatctttttcagtaaagtgtctaaaaagaaaggcttttttggggggggtcatgatatggtaaaatcaaagctttagaaagacaaacgtgggctggaattagggtcttgttatgaaaatcagataggaagctaatgcataaaccaagtctgaggggatgagaagggtagtatacctataattacataccatatttgttctaacaaatagacactgaacagagaaaacaccttgcactgtgcctgccagtatactgaaaataataattactgccatgtatgatgtaccagatacatgcaggcacacgtgtacacagtcacaggtatgaagtaacttaatcttcacaccacctccatcaggttctagttctctcctctacccttcatatgaggaaaccgaagtacagagaagaaaatcactcacttaagttcatacagctattaagagtaagtgacatctggaggattggaactctgtaaccaccacacaatactgtcctcatagaagtacctccattaatgtttgttgaattaaatgaattttaaaactataagaaatcaccaagcatacctatttcatagttctgtttcttagaatcaaaactggtttgacaaacacactaaatgaaactcttctcaataacacatagcacatattatattatttgaacaataataaaatggcagtattcttccttatttaccaactggatcaagagtggtggcccccaaaagtagcagactatagggttcattatccatttcctgtggttctttctcaaaactgtcctcccagtgatggaaaggcaaggaccactaaatacaggctactttggggacatacctccactgcaccccctgcaccccttaaccagggcataattgagccatttcctcagtcagctggatgcaggctctttccactccactcaccaatggaagacccagcctcattgcttgggaacaattatgccctgccagggtatgagagcatccacctttgaaaccacttctgcagagctagaaggatgagagcaaacaaagaaaaaatataacaaaaagccctttaatccttatttcttggctcagctctaggagagttattttactgagttctccaagaagagataagagatgctaattgtagtatcagtaatttattctaggaaccaagacagttcatgctactagatcaaaataaacacatttttagaggttttatattgtaagggtgtgaaaacccagctctgttaggatagtactctaatccccagaaatgaagtccccagaatccatctgatttgtctcttggtcagttggaaaactcagaatttgcccattttttaaaactaagtaccaactttgaagtacagcctatttttagtgctggaaagtcctacaggtcattgacagttccagacctacagtgttgtcttcaagttcttaaagcttgttgagagaggagacttgaagtttttgatcaaaaaggtattcatatttgataactttccattaatggcagtctttccctggtaatgtccattataagattagagacaggttctctcaagggaaaaatgttggtttactgtatttccagaggaagtgggactacaaaatagaaaaagagaaattcaattaaaacttcatataaaaaaaacatttttgtcatgagacattagaataaatttcaagtactgtcattaactttagattgtgatgtctttctgaggcataggcatattttaaggtgcttctaaaaggaagacagaaaacagcattttgcccccaaaccatgcccacgctgcaaaaacatctcacaactacagttgggttcactgtggaaacagtctgattctgtggcaagagctgagcctgagtaccactcgttgcccgtgtgaccatgatgaatttctttctctgaaactgaatttcctcttctataaagcaggaataagaatatttatgtttagagtcattgtggggattaaatacatcaatgtatgagaaatagctggaactggtattaacttactggtggtagttattggtagctccttttccctaaaattacaatatcatgaaatcccaagaaattccatcaactaatcattcatttctgtatgtacactcacacacacgcatttcatacaagcagtgtaatgttaatatagaaaaatcatagcctgtggtcatctatcccatgaaggtccacattctgagccaggtgttaaaatcatggttctcatttatgcttaccatgaacagaatcaccatccccaactcagaggatctaagcttaccatcagttcttccttggcattaacttcacagctgccccttacccagaaatgattcttccattgaaaaggatatcatttataaaaattatacattttaatgaaccagaagaattcagtaacagccacgaatactccaaatggcctttaatatttccagagggatatgagaaatctctgaacttcacagcagcccatgaaaaaagctatcctggagatgtccaaagtctataaccttataggtatttcacagaaataatgtggggcttagataatgaattagcgaagttaaggattttgttgagtgagttaccatcaagcaaagctaaagcctactttgggtctataaatcacagaaatgagtatctttaaagtttaaacctgcttggagaaaatatctggccctgcattaagatcttgagttgaagataatagcaaattaacttattcaaaagtgagcagacagcttcgtaaaacttgacccaagtagaattttcataagtactgactagttctcctctagttctgaattctgaaaagtgaaaatgacatatgattatctacctttcacttttacacctaggcattggggtctcttcattctgtttattatttagacccactgggaaaatattagctgagccattggcccaagaggttgtcttgatagcaatatctaccagttagaaagaaaatcttattttatgacttggttttttatcaactttttaccttcttcttagacttattaagaagaggctcctgtctgcgtcacatcattcagtttgttggaaagactattagttctacatgctggattaggactgaacactaatgcaagtctctttccatctaggaggaacttagtttttgcatgaaatcatgttatcatctgcagtaaaaccttagaggtctccagtatataatacatgggactgcacatagttccagctagattcaataggagcatcagtggggaaagaatcctgaaaaagtagaaagaagaccacgtaatttgaccaagaagatcatggttctgatgccttttgttgctgccctcaccactatttccaaccctttttccacaagcatagtgatggcagcaaagtccagatggcattttgagataagcactagatatatagatgagacactgaaatattattcatgatttagctactttgctttcctctcactgaccatttcagggagccatatatcaggaagtcttgggataaatgctcagagagaaagaaacaagacgttaaccaagttgaaagtgaacccaaggcttttctgtcacctgctactaccttttaaaattgtctcattggagaaatgttggtcaacctttaggaatataatctatgaaatcatgtttgacttccacaagcaaatatgttctgagcccctcctatgtgtcaggcatggtgatgggcactgggacgacaggaggagaccaaggaaggcctggtttctgaggggacattctgctgggagggctgacatttaactaaagatgtgcacagacagcacataattgcaaattgtgattagtactaccaaaggggaaaacagtgtcaggacagagaaaatagaggacacagtgtagattgagatggtttaagctgaccccctactgaaagcgacttttaaggaacattagtggaagatgtgaccaagtggttaagccaagctgtctggcatcaggtgtcaaccccagccctcctttgaccttaggcaagttatttaacctgtgtgagccttgactcctgtatgtaaaattgggataaaagaacaacctaactatcccatgaaattgatgggatgactctgagaatgagctaattcctctcaatggtttaataaatatcagctataaccaccatcctcatcatccatggtgtaattgtcagcagtaatagcagtcataaactggggccctaagaatctcattcatgaaccaggacatttttttttttcattcagtgtttacttagccaattagtctatgaatatttctagccaaagagagagagagactgatagtcttctctctgctgttttgagacacaatccagctcaccccaaatccagggtggctttttttttttttttttttttttgcgacggagttttgttcttgttgcccaagcttgagtgcaatggcgcgatctcggctcactgcaacctccatctccagggtggctttgttagcctgtaaccactctgactgagaaacaaattgaataatgaacaagtcttcagtgctcctgatggtccaagctctgtgcgtgggtgcttcctccttgaatattaccatgtaatttacaacgatttgtggttaaggattattattttcaatctacagataaataaatggaggccaagcatggtgtatcatgcctgtaatcccagcactttgggaggctgaggcaagtggactgcttgaggccaggagttcaagaccagactggtcaacatggcaaaacctcatctctactaaaaatacaaaaattacgtctgtgatcctagctactcgggaggctgagacatgagaatcgcctaagcccagtaggcggaggttacagtgagccaagatctcacctctgcactccagcctgggagacagagtgagactctgtctcaaagaaaaaagaaagaaagagagaaagaagaaagaaagaaagagacagagagagagaaagcaagcaagcaaacaagtaagcggaggctcaagaagttttcttagtgtcatatggctaataaatgacagagaaggattcaacttgaggactcagaacctcaaatccaatgctctttctgctgtaacgtagtcactgaagtatcagcccattcattgatatatgggtacttgtcagctactatttaatgaccaatcccactttcataagagaccatgaaggaactccagaagtcaccctatcccccaggctaggacttacttcaagcaaatcaagaagtcacagacttttaagttaatggtcaactgtaacacagtattccagggcagctaataggtaggacccctgtcagagcctggaagtttccgcggttttcttagcatctctacaatctttattttccactcttctttctgggtagaggtaggtctttcctgacaatctgggatggatccttttcctaagaaattatacagtacatttaatttcttagtatgtatcccaggtggatgcctcaaaatacatccaatattaaagacaggatttagtgtgttgattttggtagacttcccagtaactgttctcttttccaggaaaaaaaaaagaaagaaagcacagtggcattactactctgggagaagtggacatattgacttgttaagagatattgttgacattttaagtgccgtaaagatatttaacaggatatgggattaagatagcatttctggctaatgagctcactctcagactaagcatcaacaaagggaaagttgctaaaatggcatcttcctaattaaacaaaacaaagccaaacaaaacagcttgagaaagaattctgatcagggagataataaaatcaaaatgatgagatgtgttcaaggaaggccagagaatcatccttgctgcccccatcgcctttcccctcctcagcccatcacagaactcctgcatgaggctgctactgggtgtgtccagatgtctgtgcctctccactacagcgggcgcccagagatcacagaaatcctttctgcattgaattcttaatccccaaaggatcttctctgtgcatgcatggataaaattcttaggtgggtaattttcatgaaatacacccacagtatgtgccacatccatatttaaatccttatcatcagaataaccattgtgcttccagtagtttggggcaattctgttgtttactgttggagtgcaaacacaaagcaaccttaataccattaatttagagactaaactacttgccccattgtcccagagtagttacgtgtcacgtgggtggtagagacaggttagcccagttagtccctatccccactgagccgactttgcccatcttgctcagtggttttcagagtcagaaacaatagcatttctcacactgcccctgggacattaacacagaagcatgctttttcatggctcacccccaaggagctttctcaggccacagtttaactgccagatccctgtgacaatgactcattttagcccatgaattttttctttctacctggtatatatttgttccccatgcaggtctccatattccacccatccatgcctcctgacatctaggccccagtgtggctgtaaaatcttcattgcaacagggtttgaagactaaaagaaaatcttatctgcattgttgctgactccttaatgtgctgtcacaacaatctttgagttcctttcagaatgaattaattttaaggattgtttttctgcttcatcattaaatgccaactgtaagcctccctaaccctccacttaacagatgctattagcattttaaacctgggttcggccctggtctctctcctgagctctgcagcacccctggaatgtgtgcccttccagggaaccacagacgctataatgcatctctcttaaaacgtacagcacccaccacatttctgctctttctcaaatcatgtctggggaaactgagaagctccttttgaaggattacattacgcctttgatttttatttataaaacataaaggactaatatatatcagttaggacattttgcttgcaaagtgcattgtagcaaaataattggaagccagttgcggtgtgaaatatatgacagctttacaggacataaaaagcagctttttctttgtaatagtgtaattgccttaaaccccacaatcataattgttatcaaaaaataatcccaaggaaaggctaatataaggtgagcagactattataagagctctaatacactcgattccttgaacagcaaatgcagctctcaatctcccggtgcttttagtgtcagtcagagagtactcagtcatttctgtgcatcaaacctgcagtattgatttttccactgactgaaacagccatataagcataaattttgcatgagcctttcactttgtagactctcctttggtcagatgacacatgatgtgaacatgaagactgtataataacaatgcatggtcaatctgcaggcattaaagcgtgggctctcgcagcactgaaggacaaaagctggatcgagagagggccgcatcagcagtgccagagaaacaaatatcagctccatcttggcagcccgcgtgcaattttattttctacttctctcctgcattttcacgtgtcttattcagaaaacccctgcaacccacacacacccactcacttgcacgcatcttatcatctgcacccacttcaggtaaaactcagctttatggaaaacagtgaccgtgatcttgactgtgcagcccacccaaaccctctcattgcaccgcctttggttttctccaggttgtttttgtgtgtgttctgttggggatgtcatttcttttgtgtcgctggccctagagactaaatagtgtgtaacaacattggataagatctggtatcctgatgagaaagccttatctaaagatgtggctcactgatacacaggtacaaggaaaacaaacccttcttaatagccaccttccatttaacctactttggccctgtttgagatctccttattcactaatagttctttatctcatctctttatgatagaaaatgttctgtttgaagtgcaatcattctgtttcaagattttgccagtggaaacgagagaggagagtataatcctacccccatggggctgatagcaccttaatcccagatggcagaattgcttagccaccgctactctgctcagtcacattcacctcggccatttcatgtaattaattcatattatgatatgaaggattctcaagattaagttgaattggcctgagggaaaaattatctttatataaaagaataaatccctgttggccagatagagtcaaccaacattttcttttcagtaaaaaatcacggtgccaagcaggaacttgctatcatgaataactgcaaatgcgttcatgtttttgctttgcgtctccatttggaataacaataatagcattcaccttgaggcctgctaacctggagggagaaagatgctaggctcaaaattaaacacttgaaacttctgcagcatctaattaagggtctaaacttcacacataggcaacattcatttacgtaaatctaaacacgatttggtttatttttaaagctaagtggtcccacattcatctggaatctctccattgctcagaaaagagatatgggctctatcatttttaattcttttaatgtttcccctctccagaagaggctgcctgctttttgtgatcagcctggtctgtgctgcttgctgtttgaagagagttttgagaattattctttttatttccagttgatggcatcacaggagatatttccacttaaaacccaagttattatagtgagcagtgttctctgaaatgagttttggccaaagagaatgaacaaaatgacacttgtgagcctaagcttggagaagagctgggtctccaggccagagtgtggaggaggaagagctggtttgtttgttctttataggaaactaaaaatctgtggagaaaatgcagtaagctttcttgttaatgctttatttgatggcccctacctttaaaataggctcaaatgctaactggttagcataaagatgcatgcgtgtttaatgttaagtagaaagaaataaaaataagaagacatctccccagcccagctgagctcctgtttctgagactcctctcctcatgtagcaaatgcagtctgaactgtagcatcctgggagatgttgcacaaagacaccggggccttggacatgcactaagattacatgctccggacaccacagtctgcccaccagacccccagcatgggcacagacgtgttgcagggagagttcctcctttttcatttctttcttccctcctttgaccacccttacaatccctaccctgaagtttgatcataaccaggggagaaaagtaaagggactcaaaatatatgaaagggctagtagcagaatcttcagtggttcacatcagtgcctgttgcctctgatccatccctgtgtctaaaaattgttcctgtccgcccaatttctatctgaaatgggagggccagctctacatgccgcgagtgtgtggctatccctgttgtttctctcatgctcctcagatctctgtggaaagatcagcacatcatgagaaagaacactaaaggagttgacagacagggtctgtccctgcagctccaggaggaccactcatcactggcgtctggcctgtcctctatttacctgtcctctgtttgagtgtgggtccccttccaactgagccaaagaggaccccgaagatgttgggataatcctacaaaccagttacaaagtttagattcataagttttgcagcctctccagagtcaccacacaaacacacacacatacagacagacagacagacacacacacacacacacacacacacacacacacacacggaatcctgagcaacactagaaaaatatctgaataaaatctaactaaccaacagcttgaaatagagacatctttgccactgtgaaatgaaaagcattaacccaaagcatgtttgagggttcacgcaactttctctcctatggagagggtccttaacatcaagttataaatgagcttcctgtttgcagaggttgaacatttgtgtttggagaaacctaacagcctctgcttttttgccacacatgttcagagtctttgtgcttgctgttccttcccttggaatgcttttccctcagatgggcacatggcttgctggctcagtccctccagaggtccgctcatggcatcttatcagtgagaactccttgaaccactatgtagaaaacggcacccccaaactcccaccccacaggcacaccttatgccctgaccctgctttattttagctatagctcttaacactatgcgatagaccatgtatttccctgagtatttgtccattttctgtaccacctcctagcccccaaagaatgtaagctccagcagggccatgactgtgtgtggtctctgctggcttcccagcttcagagacacctctcatagtgggcattccatgaacgttagtgcaggaaggaatgcatccacggcttgctattatcccttctccagcacagaggaaagaacccacgcagaggcagaaatatttgttaaattcctgagctgctgctctgtggtgttgagctcagcagaaccgctcccaggagctacatggaagggtggtttggagggtggagaatttccaaaaagttgcaggaatttagatgtatctcctgccttctttgcctcatgctagaatctggaatagagaggacctgtgtgctcacagaggcaagaagcagggtagtagaaggtttgttgagtgaggtgctggggagcacctggttaacagagcctctaccctataaatgcacatggtggcttgtgatagacaagctttgtaaaataacagcaataatagcctttatttaattttggtatttctgtattttttgtacattgcctttgggcagtgtgcggctttaataaataaacacacagcttctaatgagggaatgaaattacagaattgctaccaatcccagaacaacagctgatcactgctgcccatcgcctaaatgagaagcatgtaatgtaggtcacaatattgagaagctgaagaccccagcgtcatgcaaagtggagggtcgggtagaggagggcacagagcagggaggagatgaggcacagtgatgcctagagcaactgctgaaattggggcactgcaaagaaacttctattttctttctcggctaagcttctgatgaagttatttaacagtttgtttcctattatgcttctttacgatagccaaaccattatatttttctcttagagtttagtcattatcaacatcctgcctcttggtatctgggctaaactttatcttgcctagaatgcgatacctgaccaactataaggagttgtcataagcccatttgaaagtcaggacacttaagggccattggaaaatcagtacaaggagagtgtccattgatctctgcttccttctgtcattgcacatgctacctcgtgtcataattttctcactctgtgcaacctacccaaaccctccccagagctcagacagctccagagataggcactggatttgtgaccctcagcacagattcttgcatataaaaaggctcacaaatatttgcagaaaagctggaagactgagtaatttggaggccaatgacagtgagatttgcctctttcttatttttttgtttaaacattcgcaacggcctgatatccattaaaataccgtcccatcagaaaagagggcagctcttgcagtaccaaaaagaaaatggaagagtcaaggtttgtagaatgggcccactcctgtttccatgctagtctggattttagtgtgagaagcagaggttcacttaagctgcttcaagaaagagggtgtccattataaatactaatgaggatctcctgggaatctaaagatactacagagcaatcgagtctcagggaaccaaccttgagaagccaccaggaaccaatgtcacgcttccagcatccgcaagctccttatcacagcatctcatcccttgccctccttagcaaactgtaggactctgactcttcataatttctcctatatttttggcttccataccattttggccatcctcaatctgttttctggctccttcccataacttcagctttggtgtctgttgcaaaaggtctctcggtacctaatttcaaattttagagagaaatatgatctgccctgctcatgcatttcagccacaacacatgtatcttctaagagaggattaattttgagctgaagaaagtgggcccagtttagggccgcagcagcagcgtacacaacacaagtgtttccagatcttcttgtgattctactgaactcacccgggtcatttgacagcccaagaaaaacaatacagattaatctaagagaatgtaaataatgggtagatttgtaaaatgtctaaacaacttttgagtgtgaatatccttttatatatatcctttatatatatcctagacaactttgagtatgactatatccttttattataattgaatatacaaatgaaaagttagtttgaagcattcctaaaacaatgacactttgattctaaacaaatgatcactttaaaaaattaatgtggttcctctaaatacaagtgccttcttaatgataaacatttactgttgtgaaaattattttaattggaaataatacgtggtgaatgagaaggtcacagctattatattagagctattaaaagaccaaaacaggaaaatttaaattatgaaagtattcctgcccagagtagatgagaatatgctccactaaattcttacatatgcctcatggaaagaagacactttattcttcgtgttacgactcaggacaaagaagcacgcctttctcatctttgtgtgtctggtgtcacatgaagaagctgacatgtatttggtggtcaataaatgtttggggtattaataataaatgactgcagtcttaatatttcgggaaatggagcagaatgcaaactactttggaaagtataaaggttttaactcaagttatttaaaaattaagtgagctaaatgcctggtttggattaatcggttgccaaataagtcatcataagccgtctaactttagaagtgacagtaacgaccctgggtgaggaaagggatttagggcagtgtgtctgaagctgagggccttctggcagattccagatgacttcatttttaaaagtctgtgtatgtgaatttgtcttctcaaatctcctttaaaagcagtactgcccctctcaaatttccagccatgagctcctccaggtgagcaactgtatcttctgcttttctagcctctagcacctgcctagaagtttgctgaattaatagattgctccacacagaagctacattaaaaaatcacctagtagtaaagaatagggtctcaatgtacatttaccaatggattgatggattcaagaaggttacaagcgtgagaatgatttctgcctttcccgggtacattccttgaatcccccagatgtttctctgttccacattgagattgtctgatacactgctttttttttttttgaaccctgccattttgctcttccatagctttcattactctcaccttgttatatgtatgcatctacttcctttcataaagcatgtgaccttgcacacagcaggccctcaacgagtgcttagaacaagaagggtggaatctggtggggcaaaaggacaacatgcccataggccaataagcataggaagaccggggtatcaaaatccccaggagaggatcccatcaggctgggggaaaaagagggacagtactaattctttagggggaaagaggtgagctgggaagatcagagtggaattaattcctcattaaactccctcttcatgcaataggaagaaaaatgctccctcaccaaagatgtctatgtcctaacctccagaacctgtgaacaggttgttaaaaggtaaataaaaattaaggttgtgaatggaaataaatctgctaatctgctcaccttaaagtagagagattatccaggattatcgagtggactcaatgtaatcacaaggtcctttaaagcagaaggaggcagaaaaaagtcccaattaaagaaggtgtgatgatggcagcagatcagagtcaaccagtgtagaaagactggcccagccgctgctgcctttgaagttggacgaatagagccccttccaaagaacatgggcagtctagaagctgaaaaaggcaaggaaacagattctcctatagagcctccaggaagaaacatagcccagccgacacttgatgttagcccattaaaacccattaaaacccattttgcatgttttacttccagaaatgtaagatcacagatttgtgttgttaatagcagcaaatagcaaactaataccgcataggagtctattattaactacatagcacatgtatacctaaaagtttaccagctcacttatgaggaactcccgtcaaccctctcaatggaaggtttgttgcatctgtttattgccacaagctaagctaagctcacaagccgcatacatttatattttgggaaatagtgcagatacaaaggagcatggtacccaagggaaggaaaaggtggagactttgagactttccactttctaggatcctgactaatatacttcctaatactttggggaaatacatgcacttggagttaggagtaacaacttctgaaaaacctagaaattatttagtcattgtaaagcctagttagaatttcaaattatttaatatgccttagataaaattttccatttttgaagggaaaaaaaatcttcttgttacagtgaacttttaaattcctattcgtattggttttgcttttcctgttagcacatctgaaaataattgtttgttatctagaaacaaaagctttaagccgcttacattgtgtctccgtaggattatacacccacaaaccagctcagggtgggtgtcaaaggcacaaactcgtgctccatatgtacccaccctgctttgtgaagacacatacttgcaaagaaaaagtaaaactaagaaggcaagagaactaggcttagaatggagctttcaactacaactccaagcctaaagcatctgagataaaaagataatacttatgcatttgaatcaacatcacatacagcatcacaaattccaccgagaaaacccacacttctgaagttctgtgtgcccattgaggcagggtacacacgggggaaatttatacatgcatggcactgccacacttactctacatttttccccatagacgtgtttcatgtatatcaaagctttcagatatctataacttttatgcagagggaacataaaattcttaaaagaaagtaccagtgcttaatactatttacgtgtacatttttgaaactacattgtttgggccaccactgtttccccccatttcctacagatgcaagattacctggggagaagaatgtgctataaattgaggctgaacatagattaaatacatcacaaattcttagctctcatatccttgggtagtggaattaactttcagataataccacgtagatgacttggttatgactgtaactcacaacagaaacagtagttacatatttttatttttttattgatttgtctcccaatataaaaataaatacccagaggcaacagcactatactggactctgagagatttgaaggcggcagctctaccttttactttttgagagcattcactgagaaaaagagaaatattaaaaactgtgttctggagcctgggattttatccagacattttcacatactggttttaaagtgtgtgtcacattattctgtcctcattggtagctggtataagccacaagtttcacatttaagaatcttatgcctagaccctgtatatgataaattaatcaacccacctttttcctggttgcttcattccatagagatccttctgttgtggtaacacaattgttggttgctaatttctttctgggctcaaattatgtttaatagcttttttgacatttcaggtgtaaaattcaccaatagccacaaattgttttctgtctgctttttggatttttactctagatgtttaaaaaaaaaaaaagaagaagaagaagaaggtggtaggggcaccgcagaatctgtgatattgtaaagtggtccaggtgggcagaaaatcacagtggcagctacaaaccaccttgctcatttcacgtgacaaagaatgcaaaggtaaatggaaaggaaggaagctgaaaagaaaggaagctaattgcaggccatttgtaactgttaggaatgggtaaacatattacacttctcccagtataacgtagcgttctgggtgaattgcacctaatttttttcttattatgccatttgaaggacaaactcattcttcacagaaattgcttcagggcctgaaggctcatgtaacttgtttaatcatgattgttatttgatagcattacctggtaatcactctatcaaaagttggatgattatctagaagccacattaagcaaagacatttaaagactatagatattaagagcccagttctgcctccatcacaatacattttataaacttaagcggcagctgatttttgttttccagtttcaatgttgttctctatcgagaaaaaaataaaacagtgggcagctttttaagccaactgtttactcagatgtaatcctgggtaagttattcggcctgactttgtattgagaagtttccggcctttggaaacagatcatccccctaaaacatgcacaaacgacataacttgtccttgaacagagagaaaaacaaaatggcctgttgggccccgagtagggagatgactgaggagtccaaagactgtgggaagtcaaaaggcaagcgagaagcagagagagcaggacacccagccctgagctccaggagccacattcctccttgagcacgttccaagggccgtgttgccctcctggagtcaaaggatgatcaggcggcacagggacacacagggagcctgggcctgtgcattcctaactttcctgggcggtaagagcacacttgtgtatgcactaaaactttttatctcagcatcctccctgggctgctccagattctctctctgctggcctcctcgtcctctccaacagcctcccctgctccttcgggaaatctgtgggctgctccccacagcccatgagcctgccccagctctcagctttcctaggcaccatgcagacagagcccagacgcccagggtctggcttctaagtgttgctgcagcctccggcctgtgggacactggagggtgggagtcctgtgtgtgtgcatgccctacacgtacatgcaccacacacacacatacacacacacagtcaccacaagcacacaccacaccacaccataccatgctcacaccacacatacaataccacgtacacactacataatccatacacatacgatacacacaccacacgcattctccataccatgctcacaccacacacacaataccacacacaccacacactctgtactcatacacacaccgcacacactccatactgtgctcacaccacacacacaataccacacacaccacacactatacacatgcaatacacacaccacacccccgacacacacactccataccatgcatacaccacacacactctccataccatgttcacaccacacacacaataccatgcacacaccacacactctatacacatacaacacacataccacacacacattccataccttgctcacaccacacacacagacaccacacaccagaaacacacatatacacacaccccatacacatacataccacacacatacacaccataccacacacaagccacacacacatcatgcttcacacacaccacaccacattccacacacataccacgttccacacacaccacattccacacacataccacattccacacacataccacataccacacacacaccatacacacaatacagacaccacacaccacacatacatcacatgcatacacataccacaccatacacaccagatgccacacatataccacaagcatacataccgcacaccacatatactacaccacctgcacacaacacacagacaccatgccacataccacatataccacacacaacacttaaacacacatatatgacatacatacatcacattacacataccacagacacacacaatgcacacataggtaccacaccacataccacagactccacacaccatacacgccacctacacatatatatcatattatacacatctcacacatacacacaccctacatcacatgcacaccacacccaccaccattcatatcacacacacatcacagcacagcacatgtatcacacatacacactacacacataccacacatctacataacacatacacacatgcacacacacacacacacacacacacaccccacgccacagatctgtctcctgcttcctttggtcaacaatgaaagctgccacagagacaaagttaggcaaaggttctgtgaccactaattccacaactgccagggctcagccaggccacctctcctgctcctgcaggaacctgctccactgggatgctcttcctgcactgccagctcttcttccgacacccaggcatttccctgaatcctccttcctccatcacatcttctctgttaactccttaggtcaccttattaaagtaggtcattccagtggttgcctcttagaacatatccaagtcataatgtggatttgtctagttgcttgaaactgactttccatttttggccatgatgaagaatcagcttttctggctctcactttttataaggcattgttctcatccatttattttaagtatctcattgaatcttccccacaatcctcaggtaggaaccgttatcaaccctgttttacagatgagaaaacaggcacagaatgtttacgtgccttgttcaaggtcacacagcctgtaagtggcagaggcgggatttgaacttggacctgaccacactacaccatgctgtcatttcccatctaagaatggcaaaatggacctcataatttctagggcccttttcatctccgtagttctgtgatttgttttctactatgttgttcaggtaaatgagttttcatttttgtcatgtttatgcagattgcatattttctggtttaactagaaaattcactagtacttatgtctttaagacatcagagtagatgtaaaggaaatgagccagtaaatctaaaacacattcagtgttttctctcatcgtgattttaggcctgtgggaatcagctgggagggagagcttgaaatgtgttttctgagttggctgctgcgggaagcaatatggaagggtggagaaacactggaaaaggggtctgggaacaacaaaaaaaagttgctcaatggtgccagtttggggagatctgtaaaggttcaaaatctttcaccttagaccagtttatagccaaatgtaagcttcatatattacatcattatgctgaaacagtggttcataaggttcctgtttgcagtaggaaaacaaggttgttatgagaccttggtgggacatcaagaggaagagacctaactggcaactgtcaaacatggggaaaggatggccttacaaaacaggaatgaatggtggatctgaacggctccagtgagcttgtgcccatagtcacagcggctggagatcctgacaagcccaagtcccagcagatgcttactggaactcagttttatatccattttctttttctcagagcctgattttgtaaaagttcaatgatggcatccacattggatcactgttcaactcttcattctacaaatgccgaacatgcaacaactgctatacaactgtgtagagcaattttgtgctccttctttttataaatgactagggttttttaatatttaagaaaagcataataatatactgatcaatatcacactggggaaactttaaagttattatcttcaaaatgagtagaattgccatatcagaacataagcatctttactttcaggtcttgtggtatgcattttatttatagcatagttgtagtttgttgttgttgttgttttttccaaccaacatgaatcacggagtcggactttttttaaaaacataaaatgcattggaacctataacatatacttaacaaaattacccagtgcattttctgtgaatagtacccagttccctttcccttcttttctgacaacaagagtgctattgctcagaaaatcaccatttcccatcacttttatttgactgaaaacagacgggtttcctaaggtaccatgttctgctcatctgatataagatcacgttaaagatgattgtggcaatttgtatcctcttgttgtgaaaccacatgctgtccccagaaattcaggccacatttttagagacctcttttgtgtgctttttattattataaagacacatatgcacaattttaaaattcaaaaatgtaaaaaagtattaaaaagaaaactagaaacatccctaatttgtcataagattaaggaaaatgttactttcttttttctcttttcagtattaaaataaaatatgtgttttgaaatcacccagagttttataactcagacttatctactgataatgttttggtgttcctcctttcaatattttatctaatcacacgtagtggacccacgtttttaaaagtttaaatcacaccttctatagcagtcaaggtttttttcttttagcatcttattctgaatgtattcctgaagctgtacctttggtctaaacttcactagaccttttaagatcagaggattgtgtctttgtttaattaagatacacacggttgtataatttgggtatcttttggatacaatgttctgaacaaagaaaaatagaaaaagtcaaaagaggatattataatttgtattggcttttgtgttgtgaagcctactggacatgcatacaattacatgtgtgtgcatgcgtgttcacgcacacacacgcacacacacacacacaagtcacacgccccacttcatctttctaattacccttattgcaacctgatagaatgcagaacagcatttttttattgtctattttcccccagcccctatcaccatggtccatgtccagatgtgacctccccgaaggcaggaactgtttttacttcactgttgtctctccagagcctctaacagtgcctggcactacagaggcagcctttcaataagtgctgatagaataaagatgtgtgcatggccatttcctgtcctgaattctctcagttctcccagctcctcagtctgacttccaatgtcaacttgctaattttctgctcaatggcaggaaggactggcattaggaggtacttcttgacggtctcaaggcccctaagacatcaaaatggaagtccaggcctctcagcatggtggtgaggaccatgggccctagagctgacttccagcgtctgagcccagcttccccacttctacctgggctgtgtgggcaattcacccacctcagctgtgggagcattcaatgatttagtgtccataaagctcttagaatgaggcctggcatacagtaagtgctctattggtgttagctgttagtgaaggaaaccagggagcaaggaagtaagaatgtggacccgtcattcaaatgcacttggacgcccagccatccaactgggccctactgagttatggcctggttagatgattcaatccctgttataatgaagatttgaggaaaccattctgactgcaagagtgggattgtggccccaagattatttcctgagtgtatcatttgggatggtgagagtcccagctggtgtctaaactttgttcatctctataattctgccaaacctggccactcagtcctctgacagactaagatgtggtgaggtcatcagttatttacccgtctggctcccctcctatggtgtaagcctatactcctggtgcctagcttagtatctgccacaggctaagtagtcaataaatgttgaatgaatcagtaaataaataagtacattcaatatataatttaggtgttcagaggatatatgtgcaaatatgcataatatatgcatatatacatacatatatgtgtgtacagatatatatacacatatgtatgtgtgtgtggagacggctaatatatatactccctgcataccacaaagaactgttctaaagaataaatccaagaaagtacccaaaattggttggaaaaactgcaaatgtctacacatcaaaaaagtatttgctcttattgtcaggcatggtcagagaaggattattaaaggaggttgttaggccttgagctgaactttgaaggaaaggtaaaatctggccaggcagagaaaagccagcctggtgaaataaacagaaaaggtcagaatgtatacctcaggcagttctcactttgctgttttatagaaaatataaagatactctcccccacccccaacacatacacaccctagtaaaaattctgggaccctctggttctgaatttgggataggaaatccaagcctgtgtgatcccccaggtctggggtgaaggtgtttaaactgctcggccataccccaagcacaggactacccacccaggccagcctgccttaccagagcttctggagccagatgggctttgaggaagtctaacaaaaagcattactgtccctccaccccaacttccctcagagagaaaaccagagtttcccaaatctcacacctaacccacattattattacttatgtttggctcatttgaaagtatgtacttttcttaatacatttaaacgtttacatgtgcatttcaagaggggcatgtggtttcaaataagttatccatagttttaccgttgaaatactccacattttagaatgtgctatcaaaattaaaataataatttatttcaatcggccatagttttttccccaacctggtaccgccagagctgggttttatgctggaaggtagcatctcaggctgccagaagagatttccatctcgctttgactccattaaagtaagcttctataaacagacatcaattacaaccagttttaagggttttaaaatgtaatcctacagtgctgcttaactaaatgaatcccaggaagtgatctccagtgaattaatagagcggtgtgcagacgactcactatgagtctgagttaatgactgaagaagatcaaattaattacaagtgtctccaaggagtttccaggatgaattctcccttatcagttaaagtctgtttaacccttcatgttcaaagtccgtacattttctaattgctaagatatcaataataatgggaagagaaaggctggtctgccttctcctcggaagtggaggttttcagatgtatcaaagcatctcacccactgggagggaagcatcccatgaacacactgattcaccaggcctttttcatggattggaatccagctgggtttctgtctgaaccatcagggaagttcccttggcaaagagccacaggagatttttaaaaagtttttatgcttaaaaagtgtccaaaaaagataactttattggaggcggaggatatccatgtgaacaggatcagatacacgtctgcattgaccaggaagaagggttcagggtcaacatcaacatcgttttgcaccacaaggatgtggtagttgatcagcaaagagctcctgaataagccaatttccccaggaaatcacagaagggcaaaatgctcaggccctccttggcagtgtttacgtagccttatggaatcaccctcaacccagcccagggattggtcccttgcatctccctgtgtggtgattttattttctttcttatttctttctctttttagggggaatggggacttgctatgttgcctaagctggggcacaatggtgtgatcatagctcaccatagccttgacctcctgggctccagcgatcctcctgcttcagcctcttgagttgatgagattacaggcatgagccaccgcacctggcctttttttttttttttttttgaattgacacattgtaaatgcatatatttatggggtacaatttaacattttgatatatatatgttgtataatagtcaaatcagggtagttagcgtactcatcacctcatgcatttatcatttctttgtagtgagaatattcaaaagcctgtcttctagctattttgtaatatacaatactttcctgttaaccatagtcaccctactgggcaatagaacaccagaacttattccccctatgtagtggtaactttgtacctgttgaccaacctcttcccctgcgtagtgattttgaaatgaagattctatattttgtaaataagctgccttgcattttatcactaacatgaccaagaattattttggagggctccagggatggtgtgcttgtttgaataacataattggagaagaaaacggcaaaagtctagaaaactaaagaagaggcaagttaaaaataaggggtgaatagaactacgggaggaggctgtggaataggaaagagaacacacacacagacgcccataaaattacagtgtaggaaaagcaaatgggattgggctcttggattctctgctcttcagatatacaagtgtcattttctgtagttttcttatcctttgagcaccccttattttcaatcgttcaggaattaattcatttatgtattcaataaatgttcattgagtgtatatttctaagccagacatgtgccaggccctagggaggcagcagggagccccgcatctgttgcctgtcactgaatatcctggatagggccaatttgtgacaaacctgacatagggagaatcccagtgacattttataatttacatgatttggaaaagatattcttctgcaaagtaatacgcttaatgaatgagtactagctgttaacttttcatacatttaaaaatattttatttattttttttttttagaggcaaggtcttgctatgtttcccagtctggcctcaaactcctacgctcaagggatcctcccacttcagcctcctgaatagctgggagttcaggtgtgggccattgcacctgactaaaatttctgaagtttaactgagcacacactgttaaccctaattagctagtctgctgacactcttcattcctcatgtcagaatttaatttaatttcagtatttaatttattcatactatgaggtttaccctccccaagccctttgtctatctgtcagtcttttcctaaggtgggtaacacacagcttgcttgtgaggagagtttgactggaaggggttactcagattgatcctgaaggtgcaccccacagcaatcccacagacaagcttctccttaaaatatactaattccagagaagcattcgcttttgatgactttgtcaatttcagcccctgagataatacaccatgtttttatgtgttgtctgcatagggagatgtggcaacagagtgtgaaagtcacacagtcacgtgcccagattgactgtgattttgttgctgctgtaaagtccatcaaagataatggaatgtagataaaataaaatcacattgcccattctgcacccacccaagctggaatttcggtgcagggacactaattggtgccagtttagatctgcctgatgttatctttatgagtgtctgtacttgtgggacaatcatacaaaacatgtcagggtgatggcttacaccagcagaaggatggcagtacataaagtactgaggcggaaggtgcttgatgactttcagtggctttttttaagcggagagatagaactgctgttaagttgctcaagcagaagtgtctatagggcactccaaatggcagtgtttaaaaagagctcctttgtcactttgtattccgtagaaaaataggtaagggaaagagaagctaacatgtggccagccttgcacatgaagatggatacagcgtggctcttgactgtcctgccagacactcacgctcatggaaaaatctttctatgatgatgtgagcagagaaccttaagtccactttatatataaatccaaacaatctttttatacagaattaatacacattacattttccaggaatgcaaccacccttgacatcaggagagggctaaattttgttttattcagatttgccaccagagtgactgagagttttcaccactttaaataagtctccacttcaagtgttgccgggggtatttaagttgctaatcccatgctcctggatccctctgattaatagttgtaatcctcacaggactctgtttataagtacaaaaagtcactacatctttcagcatagccatgcatgagcatttacagatggaaatacatggtattttattataaattagcttccttttatttcttttttgttatagttgaggggttatattgatttttttagaaagtctgtgtgtaggtaggttatattgtttcaattcaggctagtaagggagtgttatgaagtatgtgttataaagaaatggtgtgggtgtgatgtgggtgagaaccactgaccccaggggagagaaggaaggtttcaggctggcgcacacacagccttcacctcaagccaggtgcagcatcagccactcctggcacatgggttgtctcatttcagcgtgatgttgactcttcctggacagttcctcctagtaaaggggtcaggagaaaggccttgattctcttgaaatgctgcctgggaccctccccagtcctgtgacagccccccaacacccccaccagatacagatggtcggctgggcggcagggctggaagcctgtcttggcctccaccagctgacaagctggatagttgaggctaagctattccctttaatttaccatgcgtcttctcatcctataagtggttctttcttcatcagctcctatagattcaggtcatagaatctgccttcccaggtgcctcttttttagagtttgaggcaggactggttgcctggcaggtcctctgcaagcaccccctgagcctgttgaagtgaagcctgctagggctttgtgttcacttcttggtgcaagccaggagcttgggaaaccctcttttgtgtattgcttgcatggaaaaatgtggcatcacagtgtgagggtcatataatcatgggccatattgactgtatgtgtgttgctattgtgaagaccatccaagataaagtagacaaaatcacaccatcccattccagactcatcaaggctggaatttcaatgtcaggactaagtcaagacgagctctcaatattttccaataataggaagatgttttatcagtagtatagttaaaacaaaagtcatgaagaaaggactcataactgtgtacagaagagcacttgagggtgtttccctgtagatctcgtttatttctccctgtctttgagagacagggcaccatcacagatataggaatgagcagacttagcttcaaattccagcgggggagaccattgacaagtcacatgcctaaggcttggtatccatacacgtggtatccatgtgacttgtgacacgtgattaataatgcctgtctttaagagtcattctgaggatgacatgagggagcaaacacatgaagtagcaccatgggtgctttgtagatacagactgaatctttagaacaattttattttacagatgaggaaactgaggcacagagaggttaaaggatttgccataggaagtatgtgataggcgacttgaatccagacagtttgatgtcagagatcatgcttttaacacatgctatattgcctcaaggaaatggatttagtaaatggcagttgttattattgttattgctatttttagtctcttcgcttctcttctcctgcagagtggaaggtaagggagggtgcacaagtgtttgcaggtaatgaagtgtatgtggggcttttatcacctccacagcctaaacctggatcttgtcatgctaggaaatcaagctacaatggaacattgatttttgctggtcactatgaggcctggagggtcgcggagtcccctggtgcactcaaactttatctttctatcaattagcttacacatctctagaatgtggatggatagaaaccctcctagattacagaatcaaaccaccaatattctggccccaattagtgacataacttcaattcagctagtaacttcgaggctcactttcttccccttggcttcaaaaggctgtttcattccagtgttctacaagaccccttccgccttgaggattctaggattctctgtcagagtcctggcccagttagctttgccctcacacaccccacagaacacagagcagtctcttctctagccaggggccagctgggtagtgtatccctcaatgtagatcagtggtgacccaaccacgaccagcagccctagatccaggtccccacctattattgtatacctgtgagctaagaatggtttttacatttttaaatggttgaaaaaattcaaaaggagaaaagcactcatgagacatgaaaactatatgaaattcacatttcggtgtccttggataaagttttattggaacccagtcttgctctttcatttacatattgtgtttggctgtttgtgggctgttgaatataagtagcaacagggaccagataactaccaagcctaaaacctttatgatgtgggtgccttacagaaaaagtttgctgacatggacctaaaggcatggcaagagaaaaagttctagtttggctttgttttattttgttttgttttacaaaggaaacccaggtactgtcttgtgctcaatcagtgaaaaaaaaaaaaaaaaaaaccctatgaccaaggagcagctcctacagccaaggaatcacagagtgcccgggcctggccgtttgccagcagaagtggttctggcagctgtgtgagccgtggggagcagcagattatcccagcagcgtgagctttgcaaaattcccgtctcgtggctgagcaaacctgctcgatgtgccacaactttccgtcagtaacatgcctatatgctcattttcaaacattatctctgccaggagggataatttgctgtaatatgaggatgagacatccaggagccgttcaaatcgtcattcaacttattttattctttatttttaaactataaaaaaaaaatcctggaaatggaaatgtttccagcaaaatcaattttctgcagaagaaaaactttacagattttatttctgatccagcaaaaggctgggttccatgggatccatacggttatgaagaggatgaggagttggggtgtgtgtgtgggggtgggggagagggggttgttgttagatcagattacagaaaagctagtgcttcggaaaaacatttagatggtagatttggagataaatttaaatattatgattgctacagagaaaacttaagaaggaagtccagaaataacccaggatcatagggaagaaaccattcagtggtttttaagaaaacacagcacttagtagttgctcagctagagataagtcataaataccaaatagaaatgtattaagaactagtcgattcatcatcctcccactactgtagagagatagagactccaggctaatccctcctccactcccatcacagttcagctgctggagtcttcccagtcagcctgatctggcctcctccctctggaccagggggcctttctgtccttcttccctaccaaccaggaagcccctggagaccagcataatattttattcctcagtgaatccaaggactgctttcagggacagagctgtaataggagcccaataaataaatgttagctgaaaaaaaacaaaaacacctatttagctcaactttgggagtggggagaaaccttttgttgagtttggagctccctgaaaataaatatcctaagtattatggcaccaaacattcttgaaactgaaatttccaagatagagtttctcaaacattggctaaattcataccaactgagtcaatttgctaatgtgggacttttggattcttaagtatatatttttaggaagacctatttttaagcagaaaggataataaaggtgatttatttagtgacagtatagctcttttcccaaattattttcttctataacaagaaggagaggacttagcacttagattatatttactgaacaaatagtcactcaactctagtcaaacaatgagcaatgacaaagtcagagccactgccctccttccagaattccttgataatgaggatgaaaagacaactttaagcaaactataaacattttagggaatgaaagaaggggagatgatgggagaaagtatgagaatatgatattttgcaggatactagccaagaaattctgaagcactaacttagacaagtcaaagagaagaaaaaataaaataaaaaagaatttcagatctttcttaaggaagaatttcaaataacatatagagatattccacaccctccaggatggggaacataattctgctctttccctaccctcccccttgcctccaggatgggctagactctgtgacttgcttccaaagaacagagtgtaaaaatggaaaaatactgtacagtgaacaaacctagaaaacatgacttaaccaaatgatgaaggttaacattatcagcgatgccatgtggatgtcatgtaccctctgataggatgtgatgagacaggcagtttgcctctgtggtgttctttccaaaaactcataaccccgtcgaatcaagattaaaacatcaggaaaacttagatggaggggcattctacaggtaacctggctagtactcctcagaattttaaggtcatgaaaaacatagaaagactgggaaactatcacaggccagaggagactggggagacctgacaactaaatataacatggtaccctgcattggatcttgaagcacaaagaggatgtcaatggacaactggaaaaagcctgtaagactagaggtttcttggtttgtttttttttttaaagagtatcatcggggaacagtgagtactaactaggtccctcctccctttacctcagtagattgcaatttgtcacctactttctcaatgtaacactttagttgcttcagaaaagttaaaggcactgccttagagaagcctatgttggcaacaaaattatagtgataaaaccatgaaaaatgtaaatgaataaaagattatacagttagaatgctttttggaataaactataaagagtaaaaacaaaaatattgaaaaaatatttataataactgcatgactatggcaactttgcttatttttaacaaatttaatttatataatgtaaactaacagttgtattcaagaatttggtgaccttctcatttcaccttcaaactacttaccaaaatatttattcttgtccattaacatttaatttgaaccagtcgtataaaaaattctctttcaagaccgctagcaagactaataaagaaaaaaagagagaagaatcaaatagacacaataaaaaatgataaaggggatatcaccaccgatcccacagaaatacaaactaccatcagagaatactacaaacacctctatgcaaataaattagaaaatctagaagaaatggataaattcctcaacacatacactctcccaagactaaaccaggaagaagttgaatctctgaatagaccaataacaggatctgaaattgtggcaataatcaatagcttaccaaccaaaaagagtccaggaccagatggattcacagccgaattctaccagaggtacaaggaggaactggtaccattccttctgaaactattccaatcaatagaaaaagagggaatcctccctaactcattttatgaggccagcatcatcctgataccaaagccaggcagagacacaaccaaaaaagagaattttagaccaatatccttgatgaacattgatgcaaaaatcctcaataaaatactggcaaaccgaatccagcagcacatcaaaaagcttatccaccatgatcaagtgggcttcatccctgggatgcaaggctggttcaatatatgcaaatcaataaatgtaatccagcatataaacagaaccaaagacaaaaaccacatgattatctcaatagatgcagaaaaggcctttgacaaaattcaacaacccttcatgctaaaaactctcagtaaattaggtattgatgggacgtatctcaaaataataagagctatctatgacaaacccacagccaatatcatactgaataggcaaaaactggaagcattccctttgaaaactggcacaagacagggatgccctctctcaccactcctattcaacatagtgttggaagttctggccagggcaattaggcaggagaaggaaataaagggtattcaattaggaaaacaggaagtcagattgtccctgtttgcagatgacatgatcgtatatctagaaaaccccattgtctcagcccaaaatctccttaagctcttaagcaacttcagcaaagtctcaggatacaaaatcaatgtacaaaaatcacaagcattcttacacaccaataacagacaaacagagagccaaatcatgagtgaactcccattcacaattgcttcaaagagaataaaatacttaggaatccaacctacaagggacgtgaaggacctcttcaaggagaactacaaaccactgctcaatgaaataaaagaggatacaaacaaatggaagaacattccatgctcatgggtaggaagaatcaatatcgtgaaaatggccatactgcccaaggtaatttatagattcagtgtcatccccatcaagctaccaatgactttcttcactgaattggaaaaaactactttaaagttcatatggaaacaaaaaagagcccgcattgccaagtcaatcctaagccaaaagaacaaagctggaggcatcgtgctacctgacttcaaactatactacaaggctacagtaaccaaaacagcatggtacaggtaccaaaacagacatatagatcaatggaacagaacagagccctcagaaataacgccgcatatctacaactatctgatctttgacaaacctgagaaaaacaagcaatggggaaaggattccctatttaataaatggtgctgggaaaactggctagccatatgtagaaagctgaaactggatcccttccttacaccttatacaaaaattaattcaagatggattaaagacttaaacgttagacctaaaaccataaaaaccctagaagaaaacctaggcattaccattcaggacataggcatgggcaagaacttcatgtctaaaacaccaaaagtaatggcaacaaaagccaaaattgacaaatgggatctaattaaactaaagagcttctgcacagcaaaagaaactaccatcagagtgaacaggcaaccagaaaatgggagaaaattttcgcaacctactcatctgacaaagggctaatatccagaatctgcaatgaactcaaacaaatttacaagaaaaaaacaaacaaccccatcaaaaagtgggcaaaggatatgaacagacacttctcaaaagaagacatttatgcagccaaaagacacatgaaaatatgctcaccatcactggccatcagagaaatgcaaatcaaaaccacaaagagatatcatctcacaccagttagaatggcaatcattaaaaagtcaggaaacaacaggtgctggaggggatgtggagaaataggaacacttttacactgttggtggaactgtaaactagttcaaccattgtggaagtcagtgtggcgattcctcagggatctagaactagaaataccatttgacccagccatcccattactgggtatatacccaaaggactataaatcatgctgctataaagacacatgcacacgtatgtttattgcggcactattcacaatagcaaagacttggacccaacccaaatgtccaacaatgatagactggattaagaaaatgtggcacatatacaccatggaatactatgcatccataaaaaatgatgagttcatgtcctttgtagggacatggatgaaattggaaatcatcattctcagtaaactatcgcaaggacaaaaaaccaaacaccgcatgttctcagtcatagatgggaattgaacaatgagaacacatggacacaggaaggggaacatcacactctggggactgttgtggggtagggggaggggggagggatagcattaggagatatacctaatgctaaatgacgagttaatgggtgcagcacaccagcatggcacatgtatacatatgtaactaacctgtacattgtgcacatgtaccctaaaacttaaagtctaataataatttttaaaaaattctctttcaaaacataactcccagcatgtgctttgggagaaactttcaattgtaaaaacaatagctaagattgaagaaacagtacagtttcaagtaaataaaggtagacaggaagttctctggctcttaaatcctgtcactaataaatcaatataatcagaaaaacacatttttaaatttaaatttaagtttaaattttagattcaaggggtacatgtgcagatttgctacatgggtatattgcgtgatgctgaggttgggcttctattgatcccaacacgaagatagtgagcatagtccccagagggaagttttccagcccttgcccccctccctctctactttcttttggagtccccagcatctattgttcccatctttatgtccacgtgtacccaggagttaactcccacttataagtaagaacatgcaatatttggttttctatttccgcaaaaagcaagtattattgagtctccaagcaccagtgccttgatttcagccctggggaagtatggagtgtctaggatgtcagatcctttgtcatcatcaattgagcggggaaagacccagggaaagggaaaacattggtgctttggttaactttcccttaacaaactttcagaggttgggccaccgaagtggttagggggaaattttcctaaggaagctgttggagccaagctgccctatagaaaaaggtcgggggccaggagcggtggctcacacctgtaatcccagcactttgggaggccatggcgggcgaatcacaaggtcaagaggtcgagatcatcctgggcaacatggtgaaaccccctctctactaaaaatacaaaaattacctgggtgtggtggcacgcgcctgtagtcccagctacttgggaggctgagtcaggagaatcgcttgaagctgggaggtggaggttgcagggaggcagaggttgcagtgagccgagatcgggccactgcactctagcctggcgacagagtgagactccgttgaaagaaagcgagaaagagagggagggagggagggagggggggagggagggaggaaggaatcaaatggtgggggacgtagatgagaagcagctcctctagaccccacagtgcaaggagaactctgaggaaaagcagagaaggcgtttcggaaaagctcctgagataggatccatgggacactttggcatcactgtgatcagaaactggaagtaagctctttccatagatccaggcccaggagacacaaaccaatggcattgagcctgtttatggtcaccttctgcatggtgttgggggtaaggggagttggcgcacctggttttgctcattctccgcatcgatcagacagagtccaagtggccaatattcttccactctgttcttcatgaaaaaagcccaccctctaatgaggatgcctggcaacttaccttttatagaggaatgcagagaacaaagggtattgagtagattctgaaactgatttccagaccttccttgtaagtagaatgcaggcaggtggcccaatctagacacccacccgtgcttgtcccacccctgtgtaagggctctcctttctgacagctgagaagtccttggatttctcacctcaagaaagcccctgtagccagcagctctgtgtctgtgcccactcttcacgctggcatacagggggctatacaggcaggaacagtgggatgtgtgcctgtcaccaagtccagcatgtagctcagctgagaagcatttttgtgcatggcatcctgcatattgccgttcttagccatcaccatccacatgttcctcaggctggagaagtgaaactcaaacctccttctccctcattaccaactacttccaacattctagattctgtctccaaaacagcacacaaacacacctccagttccctaacctgacttttacagccttaatcccaactctcgtttctaattggaattaggactgcccagtctcccaggtgcaccatggccccagtctctccggactgcctggtgtgtcatgcacggccattcagaatcggctccagccactcttgccaatctcacctcatgcccttctttgccactcatcctatactccagtcactcagaacttctgatccccacaatcctcttccttcacctcaccctggagtgcactcccttctgcacccagcaaacatctactcgagttccaagccccaacacaggtgccacctgccgaccttcccaggtgtcctaagcagcatctgcctaggggttgccatgctgctcatatgacttttgattcagtccttacctttctgagcctcagtttctgcatctgcgaaataggagaaaataataacatcatcccatggggtgattgtggaaatgaaatgaaataatacattgttttcctagggctgtcatagcagagttccacaaactgggtggcctaaagcaaaagaaattcattgtctcacagttctggaaggttgaagtctgaaatcaaggtgtcaacagggccacactccctctgaaacctgtaaaggaagcctcccttgcctcttcctcactttcagtggtttgccagcaatctttggcatttcctggcttgtacattgtatcactccaatactccatcttccctctgtgtgtgtctgtgtttgtgtccaaattttcccttttattttatttatttatttatttattttgagatagagtttcactctgttgcctgggctggaatacagtagagcgatctcggcttcctgcaacctccacctcccgggttcaagtgattctcctgcctcagcctcctgagttgctaggattacaggcgcctgccactacgcccagataagtttttacatttttagtgaaatggggtttcactatgttggccaggctggtctcgaactcctgacctcatgattagcctgccttggcctcccaaagtgctgggattgtagatgtgagtctccgtgcccagcccaaattttcccttttattaggacatccattcatattaggtaaggaccccctcatgaccttattttaatgtgattatccctgtaaagacactctttccaagtaaggtcacactctgaggtactgacgtcaagacttcgacatatctttttgggagtacttaatttaacctgtgacatataataaatgcaaagttttcatatgtgctaagcccatgctcccccaaggtgtgtgcagatggcttgcccactccactgtcaggcacaaccctggcatctataataggtgacccaaagtgtgtgttcaaccaaggaaacacagtccatgctgcttcctttccctccttctctcctgagcattcccatctgaccttataggaatgctagaatcttaaactatgccactacatataatacaagttccaagattaaagattcaaacagaccatgtctctggaacctactctcctttccattgctttcgaaaattgctgaagaggcaattacagctgcatgttggtaatggaaataattatgactactttctgaaattagttatctgatacatttctcataggtaatttaaggggggcagtgaagtgggataggtgggttcttttactgaaagcttcacactctataattgaacagcataatggaggaagaaaactaatgcaaccaagataatgcataagataatgcaaccaagagaaaataagttaacatagcgattgctttgggatttcactaaactgaagcactgggaataaaacatgaatgaagacatcttctgcctacaaagtaatcatcagatcctatatttgcagtctctaaaaagtgatgatgctcacaagttggcagacactagcgaatttccaaacagttatgatcttgccagaaaccggagcaccctcgtgcaaaatctcctagagtagcaccaaaggacactttgctagataaatgcatcttttaaaagttttagtatttatgaatggaaagtaccagggaaatagagaatacaagacatatgaaaacacgttcatttagaaatcatgccattttaatgtttatatttttttattttgataaaatatacataaaatttgccatttcttaattttgtttttgattgatatataataactgtatatacttgtggggtatagtgtgatgtcttgatacatgtgtgcattgcatcatggtcaaatcagggtatttagcatacctgtcgcctcatacatttatcatttctttgtggtaaaaacattcagaagcctctcttttagctattttgaaatatacaatacaatattgttaaacacagttaccctactgtgcaatagaatatcaggacttactcctcctatctaactgtaactttgtacctgttggccagtctctctttatccctcctcctccctcccctttccagcctctgggaaccactattctactttctatttctatgagatcaacttttttagatcccacatatgtgtgagaacatgctgtatttgtttttctgtgtctgcttattttacctaacataatgtcttccagattcatccatgttgctgcaaatgacagaatttcatccttttttatggcagaattaatattccattgtgtgtatataccacattttctttatccattcatcagttgatggacacttaggttgattccatatcttgactgttgtgagtagtgctgcagtaaacatggtagtacagacatctcttcaacatagtgattgcatttcctttggctatatacccagtacttggattgctggatcatatggtagtgctatttttaatttttttagtaaaccccatactgttttccaaaatggctatactaatttgcatttacaccaacagtgtataagagttcccctttctccacatgatcatgagcattcattattttttgtagctattctaattggggtgaagtggtatctcattttggttttgatttgcattttcctgatgattggtgatgttgagtattttttcatatacaggttggccatttgtatgtcttccaagaaatgtctgtttggcattttattcatttttaaaatcagagtatttgttgctttgctattgagttgttcaagttgcttatatattctgtatattaactccttgttggatgcatagtttgcaaatattttctcctattccgtaggttgtctcttcactctgttgattatttccttttctgtgcagaagctctttaggttggtatagtcctatctgtctatttatatatttctgttgcctgtacttttaagatcttatccaaaaaacccttgcctagaccagtgtcatgaatcatttcctctatgttttcttctatcatttggcgttttacatttaagtctttaatccagtttgaattgatttttgtatgtgatgagagatgggggtctagtttcatgtttctgcatggcgatatctagttttgcgagaccatttattgaagagaatgtccttttcccaatatgtgttcttggcacctttatcaaaaatcagttcgctgtaagtgtatggatttatttttgtgttatctatttcattctgttggtcttggggtctgtttttctaaaagtaccatgctgttttggttactataaccttgtagtatattttggagtcaggtaatgtgatgcctccagttttgttctttttgtacaaaattgctttggctgtttgggttgttttgtggttctatatgaattttaagattgtttttctacttttgtaaagaatgtcactggtattttaatagggattgcattgaatctatagatcacttgggtagtatgaacattttaataataataattctttcagcccatgaactcaggatatctttccatttatgtgtatcctcttcaatttttttcatcagtgcttaaatagctttcattgtagagatctttcaactccttggtcaaatttattcttaggtaacttctttttttggaactattgttaacgggattgctttcttgacttctttttcagatagttcaccattggcatttagaaatgctatgatttttgaatgttgattttgtctgctgcaactttactggattcatttattagttttaaaggatttttggtggagtcttaaagtttttttatatataagattatgtcatccataaatacggacaatttaacttcttcctttccaatttgaatgccctttatttttttctctttcccaattactaatcatttttaagtgtatatttcagtcgtactaagtacattcacattcgtaagtaaccatcattgctatccatctccagaactttttcatcatcccaaactcaagctcagtactcattaaacaaaaactccccattccctccactcccaagcccttgacaaccaccattctactttctgtctctatgaatttgattactctaggtatctcatgtaaatggaatcatacagtgtttgtcctttggtgactggcttatttcattagggtactgtcttcaagtttcattcatgttgtagtatgtatcagaatttcccttttaagactaataatattccattgtatgtatacacagcattttctatatccattcatctgctgatgaacacttgggttgtttccactttttggctattgagcaaatcatgactttttaagcttactttattttaactcattcccaagacctgctgattttaccaaatgaacatgttaaagaaacactgcttctggatagctcagccaaaagacacttaacttattttcctttctaactttttaaaaatttagcacctgtactctctcaaagtgtgacacgtgcattattaaattattgcagataatacaaaaggatacagataatacaagaggatgcaaacgcttaaaccatttaagtgatttgcttaagcacacatctagtaaatgacaaaaaaaggatgcaaatttcactctctgcctccaaggccaaacctttcccctacaccgtgaaccaagcctctccggtattatcaagatcctatggtctagagaaggctggaaatccctttgcaaaagagatttggtagtaagataaatttttctgatgtacacatgattaagatagatacttggtctgtatattggagatctgactgattccatttaacacatctcaggctgggctagtgcaactctttctgtataagtgcatgtttgtagcccaaagtcttcacagtagggagcaaatttacaaggaagtcatataataaactcctgtgagctctggctttctgtggattttgtagctgtggtagtagctgttcacaagataaagggatttggtggggtttgaaaaggctgctgttcttacatgtattttctccaatgaatgtgctggaggaaatttctcctgacaggttattataactactttaatgtacatatgaccagctgtctggaaaacagttcaaattttgaattgttcataaatatactgacatacttggtgacagcacatgaacatttaatttgatctttgttctttaaaatagtaatattgccttctgagtgggagtaagacactatatcctttggagaaatacacagctctttctctgtgctagctttcaaatactttctgtttggtattttaatgtgtttgccattaaaatcatagcaggtttgggcttttccatgccactcaagaaataagaaatggcttttcttcctaattcaagttaaattcagtcaaggttggtaagaatatgatgttatttcaaggtctgtttcctcctcctctgaccatataagatgcccaaatatctgtagtccctaacaataaagatggtctgggtgggtctaggcatcattgcttctcacaggcaaggtccgtaggatccacaagaaggctggaggcttcactccccgtggacctgggtcagccatggggatctccgtgaagctctcaagcccacagcttgcatccctcacaggggataccattacatcttacagagaaggaaacctaggctgttctagtggcttggccagaaagcgacaaatcctggattttatccccaagtcttcagactcctaatcaacaaatttttttctaatttgtcacaactgtatttcttggacttttcctcctgcaaggattggaactcatcttctatcacctgtaatataccccctcactgcagatagttcccactgaaaactctgatgccatgtttggttccatgcatgatgcacagattgacaaagggacaaggtatttttcaagactgcccataaaacctgtaggatgtatggccaccatgctcatcgtatgtcgtgtattagtcactcacagttttctgcccaactcacccactagcaaaaaggccctttgaatgtgtggtttgtttccatagccagtagcaatggttcaagaattcccttttgtgaatatagggaaagttgccagcttgttttaaaacatatttgtactggatccaattgctacatgtttctaaaacttgcatggcaatgatatggatttcaacattttgtaaaactaaaacactccccaggtaaggaccaaaaaccttatgttttaaatcatgtgagttagattttgaaaaaaatacatatttcaatcagccatagaggaaagaaatctgaaaattatataaaatgttgtaaaaagactggcccttggctttacacaagatgctgaagtttctcagtagcatccccagcaactccatgttcccccatctgtcagctcctctgctttcttcccactcctggtgccttcctccccatcctcatatctaaacctgttttcaggattgcatatgatcttagcatttattcccagaagggaggaagcatgtagctctatatttccagcacaggacacacgttgattcgcaataaatgctgattgatggagtgaattagtgagcaaaagggtgaataggagtccatgagcttctcttcccaccagcatctgtacttaagcctcatctctacttgttgaccaaacagttttttcttttaaactttagccccagagagcaagtgagagagttaacctgggaagtgggaagtggggagggaacctctgaaataatgatttatacggtcatacatctatcccacttaccagcaagatggggctgggggctacattacatagattcaaagactctagagctgttaaccaagccaaggatcacaaaagtatttctgtagcaggatggctggggtacacacagtttacaaggaggaaacatcctggctcagcagtgaatccaaaataatttaactacctacagtacttatataatattatttcctaatgtcattgttttagaaaccacagcatggtttaatcttactgtcaaattaaggggcagaattaacaggacaatgtaaaatgttcgagttacccgttctgtaaatggtgtgtctttccagatgtgctcagatttctctcaaatacagttttctggcctctccttgaacattcctggtgatggggagtttatgttggacaggtcagattgttagaaaagttctttatattactctggaatctcattccctgatgtgaaactttcattccttggccctattacgccagttgacatcagcattttccaaagtgtgtcccaaggatgcaaattagtttcatagaatgttaaaaggtatcatcatcattgtcatcatcatcatcattattagagacagggtctcgctctgtctcccagactggagtacagtggtatgatcctggctcactgcagcctcaaactcctggcctcaagggatcctcccacctcgtcctcccaaagtgctgggattacaggcatgagccaccatgcccagctttttgaggtatctttttttttttttttccataaggcagagagggagtttgtagtcgaataagaatgaaattcctaacttaaaagatgtcaagcgagtctgcttccccagggacttttcagagcttttaataggctaatggatgctgtgagtctctatgaggaacaggcacaaagcctgcttgtgcccacagcatcactttttaccgacacagcatctctcaagattaatagcccaacaagcaatgtttgcaaatagttacctaaataaacataaaataaacctactttcccttcctcaaaccagctcatcgaataactgaagaaaatgataaggaagataagttctaaatccaggctaaatatcgtagttccctcaaggcttgtgcgcgtgatatggcttttagacctcaaagtcccggttccctcccctggattcttctccctgtatgttacccctgctttaatgcacaacgccttaaagctaacgtccagatttctagttactattagctattgttcaccctcccaggccttagcttctcatcaaaaaatggggaaagtcatagtctaccaacctcactgagtcattttgaaaattaaatgtgttcatgtatgcagagtactatgtaagtgttagctgtgtgtcattctattcagggcctattccctcttaactgtgtttggttttgcctttcacattcagattccaggagacacacacagaaaaaaacacttgggtcaatcatctgatgatctaaagtcttacctgtccagggtcattctttggttcccaggtgctttgctactccaagatcacctggaagctggtaagaaatgaagaatcccagaccccagccaagacccactaaatcagagcctgcattttctcaagaatgtcaggtgatttctgggcacatgaattgaaaaccactggccttgacggtatacgcagcacccagcccagggctctgtatataacagatgctcaggggggctttctggcatctgtgtatattgactgaacctgtatactgtcagtaggggagattgctgactgggaaattctggagtcaaaggcatgtaaagggtaaatgggaaggggcttggttcgtagcaattaacactatttgcctaaataagatcaaagagcaggtacattttaaacactaaaaaataattaaagaccaagcttttgaattatgctttctttttaattgtttaatcttctttcaattataatcaaagctctagcttttgtgagagataatgttaacaattcaggggactatttatcctcagaggcaataagctgcagtgtcaagaccaccatctttgcaataagacagacctgagttcaaagcccacctctgcccctctcagctatgtgacatggcaaataacctcacctctctgagcttcaacatcctcagctgtcacaggggcataatcatgctcatctcataggacagaggaggataaactaatatagagcttctagcatagtgactcacaagtagcagacattcagcaaacactagttcctttcttcttcatcacatatcagccttctgttcacgaacaccttggtcaagtgaaaaattgcaatgctttttggagatacaaccacctggtccattggcttgcaagcccatcatttaagcagatcgtgaatcatctgtcctacagtgcccatagtcatcatagttttcaacccattccctaatcgtggtcagtagagaccacataataaaaaagcagtgaatgaacatatcaggtagatgctgacaacaccactaggtacttcattgaatcagagtgtctggcacatagaagacgctcagtcaatgttggccaccgaaactgatagtgacatacagttgtggaggacatctatgccaagcccccatgcaatttcagcatccttccacaccaggtgctcttcagcctctgcctattcagccccaccaagaggtattcaaagattatcaagacagcacattccatccttagaataaaagattaaacccttatttcattttgagcccaaaacggtgcgttttctccaacttccaaacattgcttctgatcttcccctaaactggagctacctaactataattccttcttttcaggagaacatcttgaaatatgttagggtagcactcacacctccctttctgcttattttccccccatgaacccctcctcattggttcctcctcccagctgcctctggaaggcatcactggcagctctgcctggccacaggtcctcctgccccagcattacccaacacaggccacacatacagggggccactccagccccagcactggaaactagacagcaagacccagaagggctggtccagccttgctatgaactccgttctagctatgaaaccacccaccacgtgaccattttattttcaagtcaaactgttaggttatataattaaataaagttttttgtttgtgtcataagccaagttttgctgatcttgcagctatacagttttgttttgttttacctaaaagcgggacttcattttttttttcagttgatgcccacattaaaaattgtcaaggtcttttagtattctgattcaattgtgaaaaatattagctatcaactttcactaataggtctgtctgtgattcagttccaaattgtttgaaattctagtgtagctcttgatcattcaacaacatcaaaatgatgttttaaaagaaaatgtatacagtcagtttttaacagttttctccaataatctgaatttatggttcaaaatagttggccttggttttggtagtcgattaaaacaaataccctagccccacagtatagcacgcaggtcattttcagtcagagatgttacatttccattattatttgtagtgtggggcaatcctcatggggcttgtcatgtcatctctggaccgtgttcctcctcacagttgctgtcagtagtgtgagcagtgttgctgttggaccatctcagcttagtcagacggacttgggcctcagttctcaccacccagtgacatttacaaagaataggcataagactcaggatgacaaaatgtaaaatcatttctctttaattagaaatgataagataaagcaccatccaaagttagaaaaaaaatatgacttaaggaaaagtattttttaacgtgtttatgtcagcacctttcttgtacacacagatatacaagttttaaaaatccatttcatattttgggttggacaacatcctctttcatattagtccgtctcctgaattgctcttcacaactccttccccagggctacttgtccccacccatccccattcagaatccagatctcaccggaaacattcttgttgccacagcctacctctcccttgcacctttcgcttgagtagctccctgggacagtgctaaaagcttcaggctgcctagacaagtctccccaccaagccactccctgtacagaatctgttcttgagctttgtgctctgatattctcgattctaaacatgggtaggctatattccttttaatcaagttcttcaagctgaacctggtgaatggctttgcaagtgccatttttcagggactaaacatatcgtgctacaaaatcaatagatgttatattcaaagttaattatcatttctaggtaaatttaaattaactgagaatttccttgaacgtttttgtttgttgtcatccttatgttttcctccttaagaggcagaccatgtgtcaatcttacaaatccagctatgccctctctttgcaacctcctgagatgctctgcaggactttatgtggtgactacctgtcctccttcagggactgcaggcctgtgattatgaaatagaaataaagcaaaattccccagctcataaaagacttcactcacaccacgtggctgccaaccaataggagtaagatgggctagtgaaaattgcaagtacttgtggagaagattagatgattgattcaaataatgtcactactataaagaaaattttaatctggatttatcaagcccctttggtccaggtctctgaactaatatttagaggcaaagaggacagaaaaaaaaaaaaaaaaaaaagcacaagtttacagaacaaggaactcagcatcattgcttaaggtttaaactttaagtttttatctggctgtggatataaatttgggttacctcttctagctgataacgtatagcatttggcaaatctgtgcttaaaaattcacaaattaattcccatctaatcaccactgtctttcattttagaataattaaacatgagctaattaaatgagtcttttgaaagtgagattatttgatagcattaacctacatttgacctgctgaggatggcacattagatgccaatgcattatttcaggttttgcattatgttgttgtgacctgctataattataagaggaaaatttttctctttatttatgacacataattttagatggcttccagatattacatctcatcttgttttgctctttatgagatgcaaagatattgccaccatccaattacactggatcacaagctttagaccggctatgatttaattacatttttgttcattcaaacatttatacctcgtgtgtgtttccaaatcattctcactctagtggcaatttcccaacgtggctgcaggagaaaatggcctttgaaacagtgctctctctgcagtgctttagagagagaggcagcacatgaagaagaacctcagaagatgagggctaggcttgaagcacggtttcattaataccggatggcagaaaaggagccaagtcccagataatgaggaaggagttgcaattttttttaaagctatctggtgacagggaaaacaaaaatgacattcagctgacgaatgagcggagtttgacctagccttttgacccttgacaatcaatcttacctgctacttcataaagaattatagctctgccactcacatttgactctgtatttttactattccctttacctttttttttttttttaatacatggtccaagaagataaatgtttatgttggatatagcagagaggaggaaatatgggatactcagaagggggaaaaaaactgagaaggagaggagagagcaacaagaccaacagccataaaatggtttatacatgcaattcagaattgtcagggatattttttatgtggctgaccaaaatagcaactggaaataactgatgaccctacacaccttccacccggcgccgggctagatgtgaaacctataagagtgggggtgagtcccgagctcatcttcctgtctgcctctctgctccccacctccaccctctctaaaatgcatccagtgaattttgatgaatccattccccgtccacgggctctgattaccatgttcattgtgaagggttttggtgccatcattatgggaaagaaagggcagggagtcctggccactgagctgttttcattatctgttcaaggcaccaatgcaagcactaaacagtttgtgctcggcccatctttgtgtccaccaacagagcgtaaatcaacaggggtgaaaagtagctcactggggagcgagaggaaacaccttaggaataagagataaggtcttcgttggcatttgggatgcattgtttttatatataatttgatgcggtttgtctcaagacactaaaactgaggctagtcagcaagagcaactttatggagcttgccctgtacataagctgaccatggggagtttttcttgcctttatagagtcgagaatcttttcatgactgtactggagacttcagcaaaaactcagtctcatagaagcggaatgcaatttttgaccattcaatccatcctggatcactgggaacgttaagctgttttcctcatctagcctcaaagaagataattgggttggggggctgcagggatggctggggtcttgcagtggctctcaaaaccaaaaaagaaaacatcagagtaggctgtgcgcaaatgagccgtttcgtacctcccttccaaaccccgaatcttgcttgggctctggccgcctctgtcttaccaaaaagagaaagcatccaggcaaataaaaagaacctagtgattgcgtgaaaagccaccaatctagctctgacacctttctcggtaagcagggattacactttgctgttagccgcttcacaaagccagctgtgcgcctgcctctgcccggccccgacggtgccaggctcctctctgctgcgggtcagctggcttctggggggccaccctccctctccttggcatggaattcgttacttccagaattacaaggctgacaagctgtttatgaggtgtttccgggctgtgtgttcataaagaatctcccctcaaaatagggcgagctcgttaatggaggaagtgaggtcagtgtgcttctgacaatcctaacaagatgacagaatttatgaagcgctgcggtagaaagatgtagttatctgcagtctattcatataataaggccgcttggggcccgtcgttactccccttgaatttattttcctttcttcattcctttttgttgtccggctcttcctttggctttcctttcggatctacctagaaccattatcgcttcagaccacgtgatagccgagggaagcaggcccacttcctgttaaggatgggtggcccgttcactggactgtgtgtgaaccccggtgacaagggagggtggagtgggccaagtctttgggtcagctttgcataaaacctaaatgtggtaccaaatcagcagcacctgaagaccgagttcacattttaactcaacccaaaaaaggaaacccgtgactgtttttaaagtccaactctttctcatcccaatgaacgaggacatctctttttctacaaccctgtgaggtgaggtgaaattgcactgtccctggggaaactgagaggcatgaaaccatcctggcctgagtgatcagcgaagactggatggggaggtccagcttggtctgcacaagactggagcaaaggatgaaaaactttgaaagggaaaaaggaaaaaaagtaagttaaacccttttggtattaaaattgagaggcaatttgttaatagcatttattagttgtaaaaactaataaccagttaagttgattagtaaaaggaaataaagtagtgcctgtattcaaactatgagaatcaggtctagtgagatcatttcactgtgggagaaaggtcccttcagaaacctgaaaccatgatggcaacagctgtctctattttttactctgacttgatgtttctggttagccagaggaattagaagtaggtttttccagccaatttgttaacaagatgcattcatttgtctaacaatagtattaggttggcgcaaaagtaattgcggtttttgccatcaaaaagtgatggcaaaaagcgatggcaaaaaccacaattacttttgcgccaacctaatactacacaatccactggggagaaggaaaaataaaaagagttactttggataagcaaaacaaaaacatgctactgtttcctctgcctatctagactgaaagagctgtgaagtagcaaaagagccaaactgtgtgtaagtacaaaacaaaatttatctcagttgatgtttttataaaacagagtccatcttacctttgaattttatggaccaaaatgttgtttcactagttgctgtaccattgaagtccaccaaatgcaccctgattcattctagagctcaagaaagggatgggccagtcttggttaagccagatcaccaagagatggcaggacctgtgccactcccagcaggggtggctaatgtttatccagcctgatgggtgtagggtggctgggccattccacctcccacctcaagattgacttgtatttgaccccagggaagacctcttatgggatgcttgctggactgagcccacaacatgagaacatttcagagtcaggcctgggacttatgttgaaagacactctgcattgaaatcaggggcgggtcctgggggaatgatcatttcatttggcgaatgaaacaggaattccacaatacttcatggattcagagaaacagattatgaatagattctcatttttcggtcatgccatgaactactctagggttaaaaaattatatttcttagtttgcattctggtagtcctaagcaagattgttttaaatgcttgcttgcttgcttttttttttttcaaaatatttagtccaaattgtcttttccacagttatcagagtcctaaaatgaaaacctagggggtatgcgtgattgagttctgtaagcaacacacgaaaatcagtctaactgctttcttgggactcatgggagaattgtgacgtgacaataagaagttggatatggggaggcccagtgcggtggctcacgcctgtaatcccagtactttgataggccgaggcgggcagatcacttgaggtcaggagtttgagaccagcctggccaacatggtgaaacccagtctctactaaaaatacaaaaattagcctggcgtgatggcacatgcctataatcccagctactggggaggctgaggcaggagaatcgcttgaacctgggaggtggaggttgcagtgagccaagattgccccattacactccagcctaggagaagaagtgagactccgtctccaaaaaagaagttggatatgggaaagaagagtggcagctcaaacctagtatttagatagagtagtcctgtgtgttgttatatcttgatatcaagaaggcaatgctacttaaaatgatttctacaaacttcatagacaattgtctaaaattcatccactagaaatttcttccaatatataattaaacatattctttcaaaacacaagtaacttgagagaattaacccagttttatttcatatcaacaacatgtaccagacactagactagacctgaggaatcttggtacctgcctctgtaaagctgcatttccctgttatcagcccttcacactttagcagaaattaatgaggagctagtgctgttatcagacctttgcaccctaatgggagtgcatttatcacataaatgtcatctgtaatagctttatgagagcaaagtcacatcatagatttaaggaaattgaaacttagagatatctattaagcttatagtattctagttaataatttcagagtggagcccagtcttcctacatagattcctgctgtacattctctgggtttttatcttttgtgagaacaagagaaaatggaagagttattagatgctcattaattacagaaactctaaaattaattatttatgagaactctaaaactaattaatctgttttccctaccaaacaaattttaaatctgaatttttgccttccctactaagtatcattgagaacaagatacaatatcttagtctaattgtagccctaatactcacatttaccatgtatagcatttcaataagctaccatcccttctcctcttcctctcctcacatccaatctgttttccacgctgcaaccagcgtgatcttctcaaaatgcaaattttagcattttgtacccttgtagctcttgggataaaagccaaaatccctaaacacagcctcaaggcctccttccccaggtctcctgactccctcccactgcacagtctgtgctggtggtgttccctctgcctggaacctccttcctccccacctcattggcaccaactcatcctcagggaagccaccctcctgccagtgccaccccagaggggaacagatgtaactttacattcctatatgtgattattagcttaacgtgttttcccctcttgacgcttagctctatgacaataggttctacacctggttttgttcactatggtttctccagtgcctggcccatgtctctcattgaatgcatgaatgaacgaatcaatgaatgaatgagtttaactgcttcataaaagctcagtgcatttatttattcaaagccacaggagtttttaacattaacatgctctgtaaccccaaggtatcagaacaatatgtacagcccggagagcttttaattctaaaatatatttgaaagcctaggtctgtttgtgcctatgagacaaaagagttaaattaagcagtaattaagaagagttgatgattagagtaaaatctctaataataatgctttttaaattgtattctttagtgtttatgcctaattattttaataggggtgtttacaaacacacatacacatacacacacacacacacacacacacacacacacacacacacatgaattcacatatacgtgcacatttttttcctggactgaattcagcattcctgtatgaagtctgagactttgtactatgataccatcagcatcacgggtttcctattggcatttaccttcactataagacaaaaatcacttgaaactcacatttaacaagtgatgacgtgggccacgttattataatacaagaaaaacttggttaagtgtatagttgcctcagaccaatctcttatctgactactacttgaaccaaaaagtagggaaaccggaaatctattgctttaacatatataatcatggcctgaattagtttgcaagaccactgtgacatatattgctcccctcttaagtccagtcttaaataaaagtatgtgtcttgatggatatttctacaatacagctgctaggctgccatctgtgaaatgtccctgacagtatgggatgggattcagtgtagtcaaattaaactatcctcaacaaagctgcaggtatcacactacctgacttcaaactatattacaaggctacagtaaccaaaacagcatggtactggtaccaaaacagacatacagatcaatggaacaaaacagagacctcagaaataacaccacacgtcgacaaccatctgatcttcgacaaactgacaaaaacaagcaatggagaaaggatctcctattcagtaaatgatgctgggaaaactagctagccatatgcagaaaactgaaactggaccccttccttatatcttatacaaaaattatctcaaggtggattaaatacttaaatccaaaatccaaaaaaacccaaaaccataaaaaccctagaagaaaacctaggcaataccattaaggacgtaggcatgagcaaagacttcatgacaaaaacacaaaaagcaattgcaacaaaagccaaaaatgacaaatgggatctaactaaactagagagcttctgcacagcaaaagaaactagcatcagagtgaacaggcagcccacagaatgggagaaaatttttgcaatctacccatctgacaaaggtctaatatccagaatttacaaagaacttaaacaaatttacaagaaaaatatcaaccccatcaaaatgtgggcaaaggatatgaacagacacttctcaaaagaagacatttacgtggccaacaaacatgaaaaaaagctcaacatcactgattatcagagaaatgcaaatcaaaaccacaagataccatctcatgctagtcagaatggcaataaaaaaggcaagaaacaatagaatgctggtgaggctgtggagaaataggaacacttttacaccgttggtgggaatgtaaattagttcaaccactgtggaagacagtgtggctattcctcaaggatctagaaccagaaataccattttacccagcaatcccattactgggtatatacccaaaggaatataaattattctactataaagacacatgcacatgtaagtttatagcagcactatttacaataacaaagacatggaaccaacccaaatgcccatcagtgatagactggataaagaaaatgtggtacatatacaccgtggaatactatgatgccataaaaaaagaatgagatcatgtcctttgcagggacatggatgaagctggaagccaacatcctcagcaaactaacacaggagcagaaaaccaaacaccacatgttctcacttgtaagtgggagttgaacaatgagaacacacggacacagggaggggaacaacacacaccagggcctgttagggggtggggagtaaggggagggagagcattaggacaaatacctaatgcatgtgggacttaaaacctagatgatgggttgataggtgcagcaaaccaccatggcacatgtaaacctatgtaacaaacctgcacgttctgcacatgtatcctggaacttaaagtaaaataaaataaaacaaaaattaaaattaaattaaattttaaaaaatttaaactaccctcacctgcttttgaagtcgggccaggcagatgcttgcagttttatttttcatcactacttcacatatttttcttcatcttttttgaataaccagacagtcttatctgttgacccttttggctactgctgtgtatttcatctatttcataaagatctgtttgggtccacttagagagggaactcaaataattaataagcccaattccctgaattgtgcctacagcatttgatacttccgaaagacactgaaataaacaaaacagaaacagctagaagtgtgtcaatttcacagcaggccatgaaaaaatcctccctgcccagcagaaaactacttgtaaataggtaatgaggggcttgagttgtttcaagtttgatatgggcttcattcataattgaatgttgaaatctaaaaatcgtgagaactaaataaaccggatttaaggagcatttggttagaaactaaacaacactcctagattacccatctcactggcatttttgctgtttctgcacgtgggtcttcattcaactccaaaagggcctttgctgatgtcaaggtccctcaggcaggaaaggctcgggagaattctcagccagggaaaaagtgatgagccacaacttgattaacttagcacgctggcatgtgccccgaggcagcttccttcaggccatgctttttgctgccaaacagccactgttgtttcatgcccccagccaggaggcagagactccttctcagcatccagcccactgtttttgtttccagcagtcccagttaggccgccttacttcccactgcagagccacatctcttcccctcccaaaggcaggccaagcccacgaggacccaccatatactgtattttccagtgccaatcaccttcagccactgatgaaatcctgaaacccaagcataggaaactgtgtccttcacaaaaatgttacaagagaaaaaggtaaacaaacgtgactttataaaagtttaaaacttctacatggctaaactaaacattgtgataaataactagaactaaagtggaagccagaattcagttgtgtggaatggaaaccatgcagataatcaaggatgtatccagatccccgaagaccaggaagggagggaaagtgggcagaggagtgatagggaccttaggaaggtgtttcaaagtgctggggagggacttacaactctcaggccagtcctcacggcaagtgacgaatgctggagctggccaacagccaccctcttcagccctcacttaacttcggcatagttggctcgggctgctgtaacaaagtaccgcagactgggtggctaacacaacagaaatttattttctgacagttctggagacgcaaagtctgcaatcgaggtgtcagcaggggtggctccttctgagggccatggaggaagcatctgtcccaggcctctctccttggcttgcagatggctgtcttctccctgagaggtcacatcaccttccctctgtccacgtccatgtctaaatttcctcttcttatcaggacaccagtcacaccagattagagcccaccctaaggacctgattttaacctaatgtctgtcctctttaaagatcctatctctgaacacagtcatattctgagagtcctgggggttaggacttcaacagagaaacttggcaagaggagacataattcagcctctaacaactttaccgggaaactcactaccacttttgcaaagttattttccttgaaatgctgtctttcattttacagggaaaattgtatcccatttgtgttttgaggaaatgccatagagtaactttgcctttcttcttctcaggatttttatattttggtccactatgatggctatccagaaggctatccagatgctcaaaagtggtttttcagtggctatttaatagtttttcgactccttttctttgctatcctgtaaagctagaattgatgcatttctagaagtttgggttgtgtttatttcagagtcttccagcatcaggaagaaatgatgagatcttcccagtgcccttgcaaatcatggcatccagaactgaacacaatattcccctgtaggatctgtcagtccaccgtgcagaggggttttacagcctttcctccaggcactgttcctttatcaatcacatcagcgctggccaacagcatcattctgttgttgaatccattgtagctcgttgtcatccacaacctgtaaggctttttaacatgtgctgctgttacccgtagatcacacactagcaatcttgcagaggcacaggtgtgtgagtgtgtgtgtgtgaaaccaccacaaagattgctaactgtgccttcattaaactttatgtggtcaggtttgtgtcatcattccaccctgtcatgaattttttggacccttattccatcagtcattgccctgacagtctgtccctctatgcccttattccagtcactaatgaaatgttaaatagaaaagggctgaggacagatctttgaggcagtgcatcagagagagctatctgggctgacactgccccattaaaaagtcctctagacttgcatgctcagtgatttgtggattttatggagccaccagtagcctatatttttccaacttaatcacacagacatactttgttgactttctgcctaaatccacataatggtagtaatttgtctatagtttcctccaagtctacaaagctaatgtttctcaggggaaaaaaaaaaagaattcttcctctttatttgttcatggataagatgtgccagctctgtgccattgccccctttaagcagttacaacccgcttatttaatacagttgctgtgagttttgcatgagaatgaagtcaatttctccagtctatagttttcagaaaccatcttattccatcttttgaaattttttacattttctcaatttcacaccccattctcctatgcaaattcaaaagttatgagacaagttttgttcaaataagctttgaactaaggtaacctaaggactcttaaaaaagagggtaatggacaacaggggggatctaccccaccacaggaataaagatcataatagatggatctaataccaaaaatgcactgttggggggtgatatttatttccctcacactctatgcacttgtggattttgttccaaagataaaatgtttgggtaagagtcatttgaagactaatagagtgtaaaagaagaaactcaatactccacattggtatcactgaattcagtagttgaatctatattctaacctggcgctgtttattccctgcatgtttgattggtctcaatgaaactatgagatccttgaagatagaggctatgtcttatcattgcttggactctctacagtggttagcacagcacaagacatacagaatttcaataagtacatttgtcttgacttgaaagaaacaatcaatgagagccaggaaactagagtagaatcaaaattacttcttagataagcaatatgcgtaaccacatcctttcttcatcgcttgagcatctatcatacaaccagttccattagagtacagtaagtgtttgtagaactgagcacacagtaggcatacaacaatgactgagtgatgagtgactgaacgtcagagacctagatatgaggtctaatccagtccagtggttgtcaaatttgaatgtgcatcagaatcacttggaggactttttaaaacacagattcctgggtcctacccagagtatatcagttgctccaggctggggcctgaaaatttacatttctactaagttccaaagtgatgctcatgctgttggctggggattccacttggagaatcattgcttttgcatctgcttgaaaaggcactggatattgtagcacagacatagctgtcactacagtgtattgctttatgtttttgttttgttttttgtttttttggtttttttttgagacggagtctcgctctgtcacccaggctggagtgcggtagcactcactgcaagctccgcctcccgggctcgtgccattctcctgccttagcctcctgagtagctgggactataggcaccctccgccgcgcctggctaattttttgtatttttagtagagacggggtttcaccatgttatccaggatggtctcaatctcctgacctcgtgatctgcctgcctcaggctcccaaagtgctgggattacaggcgtgagacaccacgcccagccctgctttatgttttaattcctctacttgactattttaatatggatgtgtagaaacacaacattctcagattataatttttattgtcctctatttttcacaatatgcttattccctggatctgttggaatattaaaaagaagtgatcctctggttggatgggatggaatgatgctctggaggctaggctcacttccttccttcagtcaatgtgggagcaaagctttagtaccaactatgacaggtgatgatacacacagcacacctagcaatggcctgcagacttaggaatggacatgcaatctatatatttataggaaaggaaagaagagaggaagaagttcaataaattctaagaaattgtcttattaattcttctcagagggaaaaaacaaagtcaagaaatataatacatgaaataccacctacttcagacctttataatttcttaacaaaattattaacttcagccttctccgtcttccacatcaatccacttcaaactatcccaaatatggtatcagactaattcactgaaccacagttctgataatgtcacccctttgcaccaacactttcagtgatttttatatcatttcaaatgggattaggtgtttctagaactaaaagcaaaacaaatccataaaggaaaattttcaatgattttatatgtaaaaatgtaaaagaactttatattaaaagcccaccgaaatgaaaagataaaaaacaaactgagaaagctgcaacacatatggtagactgtgaagtacctttaatatataaagaaatcacaatcagtaacgaaggggctgttgcatcacaggaaaacatgagcaaagacatgaaagagaaaacaaactacagaaacagtctctggagagcttttgagaattcgaatcgacatatcttgagccaacatttggtgtgtctcttggacgtctgaacaattcggtaacctcagacggttcaccatgactaactcctatcaaacctctgctcactaatctctataacagaagtatgtgtatcacaagatctctccaaaatcctgaccccaaattagaagattctgtaaaacaaagccaatttaaagacaggagaaaaaaaatcaagaaataatcttaaatcaagttccaatggaaacccataaatagggctcgctggcaaagtaaatggaaaccatcaactctggcttaaacagaagtcctccatccaaagattaaaataaaaataatgccccatgcaagctgagagtacgcacacacagcattcctttctatttggaaaggaagtccctaaattttttggtatcttgcagaaaatgtctaaattcctggacagttttactgaattaagatacttagcttaggtagtggctccaaaagtaagcctaaggctaaaagtccctgagcgatgattaaccatagccaccagagtgtggtaataaattctagaaagtggactcatacagagcatgatttagttaaaagtctttcagttaagtaaggtatgttagaagacgcaacacataccttcaggctaatgcctgcccagctaaattcttagcctgttttcaaacaaacaaacaacaaactttctgcaattatgtatactatacaaattcacaagttaacatgtgtgatgctaaaagccaatatgtaacttacaggctaaaatcatcatcattaccattgttggacatctagtgctgagataggctctttagaaacatgatttcatttcatcttcacaggcactttacttaagaaggtatcatttcctcattttactcttgaagaagctaaggcttaattaaatcaagtaacttgcccaggggcatacaattaggaataataatgtctctaattttgcacttcttactgtataatcaatgacaattcctatcttgttgttttctaaaatgtgattaaatcaaaatgtatgtaactcaaaaatgccttcttataactcttaaacagtattttttttaaaaagtcagaatggccctccagctttatattgggtttattatcacaagaccaagaggagttagcctactcacaagcattcatgccgcaatcaagatgtgtagacagatgtgcagcaagtgtctgcacatttcctggtatttgtggttatttgctgttatagtcctcagcgttaaaattctgaagtttccaggtattataattgcatgggaggacttctgtagaggcttttcccctgctgtgcaattccaatgagaacatacagtacgacctgaaggaaaacagttggcttaaattgacaatattatatctctctgaaaatgtaagatggtaaacaggcctttgcttatgttcttcaatgtgcagagaacatcctgaagcctgatactttgaattgtcatgtatgtgatttccactgaatatttgtaaaagaaaaagagaaatgaactaaatttactcttagaaaacttctaagttggagtagaatagtaaatcctttaaccactctgaaatatgactcaatttcttttccttccagaatagcccttcttacaatttccttttctttccctttaaaaaaaaaatctatagttacttaactgtagagagaaacattccatttgcaaatttagtctgtgaaatcctatatccatgagcaatgtctaaaatttcccagcttctaataaatagaaaccaggttcacaaatcaagagaacccaacacattaaatcaagaactgccagcctgtcagtagccaataaattagcattgttgaaaataaagtcacgcttgcttataaaagcagctattatggatgagtctaagaatttgaccttccaacagccgtggtggcataaactcacaaaggaaataatagctatcactcattgaatatcttctggtatccagacactttacccacagcattgcattcattcgtcctagcattcttgcaggtgggtatcattaagcttgctttatggatgaggaaaccgaggttcaggaggttaagtaacatagccagggtcagatttaaacatagatctccaaaacccatgctctcccagctacgccatcctaccactattacatcactaacaaggtgccagttggggctcttctgcctggttctactttctagaatgtattaaccacactctgtcatcattgtaattattgccttcgagtttttaggtctagtctcacttttggggtcactacctaatctagatacctagctaaattcagaaaaagtggccaggaatgtaggatttctgcagaataccaaaagcctaaggactttctttccaaataaaagatatgctatttgcatacgctttcagcatgtctggagcatgattttatatactaatccttggataggagacctctggccaaactggagttgttgctttccatttactctgccagaggaccctgtttccatccacgttaggattaagattgtttcttgatttctttgctcctgtttgtaatgggctttactattgcaatctttcagctctgaattaggatcagaattttgaagggatccattagaaggggtgcaggggatgtcactccactgaagtgtttgaggacattggattgttcagatgtccaagagacccaccaaatgatggcttgagagatgttgatttgcattataaaatgccctcagaagactgtttctgcagtgactgttacacatttaaaataattgttggccagccaccacctcttaaaacatctttttgctaggtcaatatttaataggtcagaatattctttctacaatggcagctttgggattgtagatcatgaagcatgtataattttcggaactctctttaagaaaaagagtaccaaattaagaatacaaaattatgtattaaagttaatattttttagaataagaaaaaaatcacaacaaattacaaatgtaaaagttagaaaggccataaacatcacaaaattcacaaatataatctatcatactcgataatatttcctaagttttttggttaataccttttactgcctcttcagatgacaaaaattgtgcaatctcaatttccatagagatgattgaagataattttatacttcctctgtcatgattaatctttttttgaaaaattattcattcttacaaaagtttcttagagcttcatgtgttattggtaagtaaagttttaggattattgtcaaacaaaaaaagtcctcaattaagttactttcattataaaagttacaagatttagaccaggcatggtgactcccacctgtaatcccagcattttgggaggccaaggtaggcgggtcagtagttcaagaccagcatggtcaacatggcaaaaccccgtctctactaaaaatacaaaaattagccaggcatgtagtcccagctactcagagaggctgaggcaggagaatcccttgaacccaggagatggaggttgcagtgagcagagatcgcgccactgcactccagcctgagtgacagagcaagattccgtttcaaaaaaaaaaaaaagagttgtaagatttagaagaatatttcatagactagcttctggctttgcatatatcaactgttgcctccactgtccacctacttccagtgccaggtgccaccgaacaaagtcctatggcagtgcatatccatgtcccaaaggggtagaaggactttctacaccaagatatttcacagtaactcagctattcatagaaggaactgcaaaccacgtaaagacatctcagtcttgacaaccattgctgaatatatccccaactcaagttcctcacaaatgcccacaaccattccaagtacccccaacctagggcagtgttggggtgggggcacggatggggatcaatgtggaaaaagacaacagaggctgccacctgcagttaaatatctcagtgaaacgtgtgatcaggaggacatggtgtgagggcctcccccaggtgcgtaagcttcccatgaggggccctgggacgtaagcttcatcagcttcatggtaaaaaggagattgtcagctctggccctacacacttcctaatctagaacccacggaaagttggtcctggactacagatgtgagtaagaattgagctcatgtctctaggtaaaaataacctcagaattccaactggaatatcagaacattattctcaaaaacaataggatttagggtttccattcttcctgtcccctctctcataccaggcagaagaagtagaacgtcatccagctcagactggaggccattgctcctgggggcagccaaaaaaggtgtattctgctccactaagccagggctgaggcacggcaggaagtgggcgccctgtgccatgtaccccaccccatcccaggaaacatcatctgactgcccatcactaactcacttccttccccctgcgggtgccaggaattgatccgcctaccttcctacccacttttcacgtcagcccagggttctgatggccattttggaaagcagcatctcagaacttctccctcagtgtcctgtggcgcagccacacgcagagacacacgccacctttatgaggttttctacacagatgttactgctcgcaagcggccattcaaagtcttcttctgtgtcacccaccctcctgtttgtttgccccccatgtagataaaaataaggcactcctggttataaatcagaacgagggggagggagtcgggcacagaatatagcgagaacgaaaagagactcaactgcctttgaggaaactcaggacttggagagggtccaaggaattttctttaagaagcaacgccggagcctccacaagggaggagatggtgcaaggaatcctacctaccattgtcacgctgggtagactgaggtggatggaaaaacatttgctctctgtcctctctcttccctcttctaccttctaatcattcagtagagaagaggcagggtaggatggaaaagaaacttcctggaagaaatgaaggagtagagatggtgaaggaaaccctcaaataatggcaatggctcctggctgggacagccgatccccatggctgtccataaagaagacatggttaagaaggagattgctagctctagaaactccacacctttaaaaaaaattttttttcctcaggttcacaaactgaagggcatttaaagaaaactgaagggctagtataatgtcaaggttaacattttaattgcataaaacatgaagaaagcctacgcttgtcatttttacaaggttacctttcctgtacaatggaggcttttatccaacaactatatacgagttggtgacatgacatagaatgtgacttacataaatggaagagctcacactcttttttctctatagctcctccagaaggcaccaacaagtagctaaattgtggccttttaaaccttttctcgcagataagaaatgcacatatatgtgtcattttgtagttttgaatgcacagggcctaattctcctatactatgtctggcccctcagtgcccagagctccatcgacttcaaagagggttttgcaggtggaatggcagataagcggtggagaatttagctcttttggatgatgtgatcacataacaaaagcctgccgtaaccccgcaagaaggcaaagttaaggttactattggagccttaactctgaattccctgaatctagggcaatccagagtatatagccccacagtgcaatacttcacagtgctttacaatgagcggaaaaagagaaagaaaaaaatcttgtaaaggatgggaagcctttcagatctgtgcattgaatctaatatttttttgaaaaataactttccaaggttgaaaagtagctgaagtttcaacacgttatacacacttaggaaataacagctttatgtataaggcgtggaagggataagtgtccttattgatttatacacaaatatctgtttaagttttcattttacgagactcaggaacacaaaggagattgtcccctagaagcacagactttttaataaaagaccctcattttcccaaccagtgatagatatccaaatcctcaagtgttggtgaaaaacatttgtcattggtttaagtatcaaaatgaaaatttgattccctttaaacagattctttttaaaattaagaaaacaccattacgcatcagtgtgtactttgtgatgctaacaaataaccattacatgatgtaagtacaacatactagttttgttctcctagccaggaggaaggcagaactattgtcatcacctagaactaaaagaaaggattttgcagaatgaaaggcaagagggcacaccagagccaagagccaccaggggaggctgcgacccagcggcagggtgctggtgaagtcccctgccttgcctcagagcaggggccccgctggctgcctgcctttccccatcctgtgtccaagacagaggtgaagagctgcttgggaagggagggaagaggcatgaagcaggacaatggcgacctcaagccgacttcctttgtttccagtgaaagcgactcatcctgaattggggggacagttaggagggtgatcctccagggaagcaagtcacatcccggttggatagagtcatcctggcatgcagtttttagcaatatttccggagagcagggagtgggttaccaagtggctgtctcctcctcctcactctttcagtcaaagaaaagccccagtcttcaacagaaactctgagaggcaaaggatccctgataaggaaaaaaaaagttcaaggagaacccattcacactatgcagagtggtcacattgggtacatgttatacaggcaaaaagcagccaggttctaaaaaattaaaaaaaaaaacaaacaccaagtcatatcacccctctgctcaaaactctcctgtggtgacccattgcacttctcatcacctcaccctgccacagtcttgcccatcacactgatcacctttttacacattatatagtgtacctacttatgaagctcattatttactttctgtcttcctccgctagaacgtaagctccgcattggcaggaatttttgtctgtttttatcgctgatttgtctcagtatccaaaacagtgcccggcccttactaggtagtcaataagtatttgttgaattaattagttaattagtggatgggtggataaatgatgttacagcattagaccaggcagaaataattcaatgatctagctatgtaggtgtaggtataaacatagagagagagcagtggctatagctgtagataaagccacaggcgaaggctgtgatagatagagacacaaatgacaagttgtaaaataaagggacaaagtatgcaaagggcaaatgaagaatttatcctgaaagtttttaaaaacataaaaaattccttacaaaaggaatgaaagagaacataaaattaattaaacaagacctcaaagaggtaatggcaacattgaatgaaacttctaaagaaagaattaggggctacagaaacacattatgaaccagaataacatgattagagaatggaataataaattagaaacatcagtgaacagaatacacatagctgaaaacagaattaatagccctatatttctatgcagtgaaaatagaagaaaaggaattgcagattaaagcaactcacagaagaaaaagatacggaggatagacattggtgatccaacataatataaaggaattgattttccaaagagaatggacgatgtagtagaaaaaagaaaaaaaaaacacctggaaatgaagaaaggactgaatcagcatgacaaaataagttctgggaaaaattaatagtgaatctttgctataaggcatgttttggtactgttaactgaacttaaaggttagttattcaggcatgcaggtgtcaaaagcaagctgtctagaaagtacccatagtaagctggtctccagctttttcacagaaacattcagtgccagaagacagtggtgcaagctcaataaagcttcgagagaaaacgtgacctaagtattttgcacaaagccaagcagtcacctaaccagtaaagccactacaggagttccccctttatctgtggggaacacattccaagacccctagctgcctgaaaccgcaagtagcatcaaaccctctatgtactatgttttcccttattaagttgagaactttcaccttttcacttcaagtgagcacttcactgcttctctttggcaaatgtgaatggccagcatcactactcttgcacttcgaggccactattaagtaaagtaagggttacttgaacacaagcactgcgatactgcaacagtcagtctgacaactaagattgctgagtgactaacaggtggggagtgggtacaatgtggatctgctggacaaagggttgcttcacttcccgcaggggacagagtgggacggtgtgagatttcatcacgctactcggaatggcatgcaatttaaagtttgtaagtggtttatttctggaattttccatttaatattttctgaccactgctgaccacgggtaattgaaagtacagataaggggggactgctgtactatgtgagagcccagagaacgcagcaatattgaaaatccactcagcaaacagaggagtggagaatccacctcactcagagaaaaccgaaagttctttccatggtttacaagtttctgccccttctggtttcccttatctttccagccccatccccgactccattccctcttgacccacactctccagcctcacttccctcctcctgatccccagacccatcaacccaaccacacctcaggccttgcaccattgcctctgcctcaagggttcttcaccacttgtcttattccctcacttatttaatgagaccttccttgctgccttacctaaaattccaatacccccaacaccctctttttctcttctctgcttgatttttctccttggcaattattcccatctagcttactctatctttacatattttgtttcttatctgtctcccccagactacaatgtaagttccctgaggttgcaaattattatctgttttctttttctttattcctacaatagtgcctggaacacagtagccattcgagtatttatttagtgaataaataaatcagggtctaagtccattccttccccgtccatccccttaacatttttgaaccagagtgaacctagagggtaatagcagttaaacggaggggtctgaaaaccaaatcttatcaggacaatctgacgaatacctagcctttgtgttaattaaccctaaatatattagaagaaatgtcaacaatgacttttcagatattgctacagaaacagaatttgaacacttacagaaaggtaaatttttccgtttttcaagaaaattatcttagcgtcagagctaatgataaaatcagcgtcttcataaatgctgagcttccctgccaatggagattgtgaaaaagatgccggatgtttgctgtcagggaccctatgggagaattccctaccatctaaaggaagtttagtccagagagcccccaacttcttctgctttgagattctgtgatgctatgcacacatgagattctgtgatgctctgcgtgcagcttcgattgttctattgtgtgtgacgatgatttgcagacatttgcgtttgggaactgtgactgtacttctgcctgcaggtcaggtccctggcttcctcacccagttcctactggctgcactttgaatcacaacactcccggcgtgtgggagtccagcacagttggttgactggcctttcttgaagagatttacaattcagcagtaattccaacaggaggaattcatttgctgtaattgagcaagcagatcatcccctatttcttttgaaaattgtcattaatatgatcttcaggcaactcctcccagctaggcatgggccttggttgaagcaagcttcagtatttctttgatgtaagggtaaaagaccttatgtgagtgagctaaagattctaaaaagcattgagttggtttagggcattttgatgagagggcatttttgctgggagtggtaaggaagagcatgaaacaaacatttgtatttgtttgcttttctgttttgtcactcttatgttcctaataatcatgttttgtaaggctattgctgtttctgagtccagttggcaagttatagaattcataagaacattccatgccacagtagaaacataaaacatttattcttacatttacaaaaacttattttttgttggaaccgaaattaatcacactttgattctaaaggatacatgaagtaaactctagcaaaggcattaaagagatctaaagcgctgaataaaaaaagaattgttcctagttctttagaaatgtacctgcttaagcccaactgaggtaattactcttctgaactttaaagtagataacttaaaaaaaaaacaaaaaacctcttagtcatggcaccgtgacagtaaagaacttctgaaagatggtcttcaggtgatcaaaatcaaaacatagcaaaacttcaacctctgtggtcttacctgtaacactgcactgttacacgtaacatttcacagcgtttccgtgacttgagatttatggtgctgtcagttttagtatcatgctttatagcatagaaagaaaagtttgtgcttcccatttgttgttgagtaggggatggctgctatgtacagctatgtataggttaggatttttgagaaagccttgctactctaattctatcaaacctaggagagaatcttcttttcacttttaaacatctccttaacatttacagtgttaatttttccagggaagtatccatactcgagggtcactgcaggaaggattttcctggcttggcttgcagctggtcattaacacaagtcccttaagtcatatgtgcaaatgaagccccaggggtttttgcaagggttagaggaggtgtattaagtgtgacacataataggtactcaatgaatgatccataaacattttgattgcattagtttagtttgtgttttggggccagtaaatctgtattgttagaaaaataaatggccactggtttatggtcagttcccactctcctccatcctccggcaggcagccttactatctgagtggcccctcatcatagctactagagcagggcagctctgctttaatcctctttattccgttcccctttctccttcaaactctcccacttatcccatggatctctcccttaagtcctggttggagtctccagtagcaagaatggcagtaggttggggagaaagaaaaggaaagaatgaacacgttcagtgtttcgacttcatgggtgacacggacctaggactttacatgcacaactttactttggctttataacacccatgtggagtgacgaattttttctaattatatagacaaaagatctaagatttagttacataatttgtccccaaattaaatggtttttctttttgatatacttctcctgtgagaaaaattctgccagttaagatgagagaagttggttgggagcagcttgaggaggcccttccttgagtttaagttcgatttagcactgtgtcctggtagtaatattggtagcagtaggagtaacagcaatgagagtggtcacagtcagaccaggaataagaatagtaacagtagtaatggcagtagaaatctcagaaatagcatgcctcagtctattgacagggttcaatattcaacttgctatcttttcagcattcctgttttaaatgcccaaaccataccatttgggtcaccgggctgacagatttgaatttattttgcttccagggagcctctgaacactggcagggacttagtgttttgatttccttttttaactctaacactaacaaagtgatcttattcagagtttcatgtgacactcgtccccaacatatccagggacccacatgcgaatacctgacagtaaagggtttggacctcaggcagtgtggctgagaaatatcctaggaacctagcttgcccctgagccccctgagttttcacccagtacccactgattgcagtgtgagtgagtctcaccaccacaatgtggagtcaagcagctctggggatacccagcagtccccatgcttgccaagttctttgtgctatgttccatataagacttatgtcttgggagcccctaagttggtgtagctcacagtcctctgtgtattgtctcctgtgaaagactttaggtttcctagttcccttcctaaatggatcttcagacttttaaagtatttatttgtaagacaaggcaacaggccacttcatcctattgctgcactttgctgttgctggaggaagatgaaatgttacaattattagtttcagaatagaacttgattttgttaaccacctaataataaaagagaaataaactcatgtggaggtgagtctttttgaatatccattctctttcaagtctttcacttgaaaagtgaggggcaaaatcagaaacatagcctgagattaacaaaagcttcccagtgacatgggattgtctcagcctgagagggaagactctgatgttcttcccaaggcaagaatcaggagctcaccttccttctcacgataagccaggtgctttattccagagcaggaatttctttttctcaaatcccaccccctccgcagtaagttatcctttatgctacaaggaagtaagtgtcgctgagctgcttaacctggccttgccattggagggtcagtatctctcagagaacaccctagctcagtggcatgtaaaactgactccccagtcagctaagcctgcacagaggctgccaacatgatgggaactcgccgatggcttgtaaaaagccagcacacacccagagggagctgtgtcctttctaaagtggatccctctttcatagtccacgttggcttggaagtcatcactggttgcctggaacatagtaggctctcaataaatacatggtgcctgaacaaatgaagatgtattcacaactcagtttttgtgccaaagatatttttcagttttaataatttatggtcaaaagctaagacataatacattaccatgggggtttcttttcacttacttgttttatcttagacaaaatggttatttaaaaagaagtttttggaggcctttctaattatattcctcattgaatcatatatttacagggattttaactattaggtacagaactgcctccagaattctaagccaataaatgacccaccttggcataagtgattattggttcaacatatattcaaaatgtatcagataaacaatcctaccttcttctctgtgtgcacttgagcaaatcattcagggtctctgggtctcattttctttatttctcaagggtaaaattgggtttgatgagttccaaggaccctgacatctctaattctcatacatttggcagaatgctggcaaaggaatcctcaaattactagtcactctttcactgtggtgagcctcttaaagacttcgcccttcattttccctttcttcgcagcctgactgtctcactagtaggaaacgttttttgcttggcacttacaagggtttttttctctctcttcccacactaaccctattgctgtctcatggtttgtaaatacttccaaagaaacacatgctcaaacacgttgataatttacaggccagctacatatgccaccaaactgttagatttttgagggtaagaaatatgcctgatttcttgtgatatttaggcacccagcacagtgccaggaaaccagtagagaccagcactactcacggttggaccaaggacccctgcaccagaagcttgtttaaaggctgccaattcctcagcccactacagggtatgtaatcaaaatctgcataggtggggccctggaatcagcatttttacaagcacccttggtgatccctctgtaccctgaggcttgatagcctctgcagtgcacagtcaataaatatgtgctgaacactgaatgaacatttccaaagaaagagaaacttacccctctcctcaacaaaggtcctagactcacaaagacaacaccagagagaaaaggaggaaaggcacagaagaaaatacagtgcatttaacccagtagttcttatgtgtctgctgcaaaagaacccttctgctctcttaggaaaaaaacaaagcaaggctcagttcctctgaggttagtgcaatcactacatgacttgttcaactcactgtggccttcaacttattcattagggctggttcttcccttacccccaaatgacgactcaaggaagtcctgtaacatcccaggctactgctaggtaatataaacactactttgctttaataagtagaacatacaaacccaggtaatagtcaaaactccaacttggggccaggcgcaatggctcacacctgtaatcccagcactttggagggctaaggcaggaggatggcttgagcccaggagtttgagaccaccctgggcaacatagtgagactccatctctaaaaaaattaaaaaattagttggatgtggtggtgcatgcaggtactagaggagctgaggcaggaaaatcacttgagcttgggattttgaggctggagtgagccatgatcacaccactgcacctcaatctggtgacaaagggagaccctgcctcataaaaacaaaacaaaactccaatttgatttgaggtttcagaccccttcacctcccacgtcctacatgtcaaccaaattgtaagcagaaagcctgtaactgggaaagggaatctctctttgttccccacctacagtttcagctcctcctcctctatctttagtttctgactctttcagaggaaaagaaagcagggatggttcctactgatgggcactaactactgttggctggcttcacgctcgctggacttggagatatttacagataactctttctgggggatggtattgtggtttttggaaacctcccaatcctggcctctcaaatacagatcctttaatgtgggtgatgccctacctctaaattctgcatgctgagatatattcacctctgcacgggactctctcagacacaatctcaggtgggccatgctagggttttgtcactcatgtgacccacatccagccccgaggaaattctcatgcaagcctcaagtgccagccaccagggccacaatctctccatagcctccctgttagagcagctaaccagcctgtctttttacctgtggcattttccaacaagaggccaacacaggtctgatgtgactccctactgcagggacataaaccagctccatggaagcctccttttcttggtatgaaatgaaggggaaagagtccctactccttcagagagtgggactcacagaacaccaatagctctttccaaaattactatttaaaatcatatttctgtataagataaacaaagcatgaagagatgtctacctaattctcagacatcctctatgcatcttgtttcagcaatgcactatagtgtctgatctgaaggcccataacagaatgagactaggctagactatttaaacatgactttaagccggctcagagggtaacctcccatcagataatatggcttgcacctttagctcactcagaatgaacctccatggggcagagaggctttaactcttctcacctgggaggtccagaggctagataagaattcttaagacctgactgaagagaataaaaaccaacaagtggccagagttccctcaaccaccgtggcccaccttccagattctgaatctccgtcagaagacctacctctccccatcaatggatgccaggaagggccatatgtttcagggacagatgcccttcacccggacctgtagcctggtcccccgcagatgctgtcagtcatcaggtggataggtgtctctggatgaactttagaagggtctgaaattccctgagaaattatgttaaatttataagtataaacacatctctcggtaaagggtacattttttttatcagattctcaaaggggttcataatccaaaaagtgtttttgcagccctggagtttcagcatggtctgaactaggacaatagtgttctaatgttggctaacaactattaatataaaagacatagagtagttgctgcttttctgagggggcacatgttccaacacccccagtggttacctgaagctgcagatagtactgaaccctctatatactatgctttttcctatttatacatacctataaagtttaacttataaattaggcatagtaaggggttaacgacaacaacaatttttggccgagtgcagtggcccatgcctgtaatcccaggactttgggaggctaaggtgggaagattgcttgaggccaggagttggagaccagcctggccaacatagtgagaccccatctcaaccaaaaatttaaaaaattagccaggcatggtggcatgcacctgtagtcccagctacttgggaggctgaagtgggaggatcgcttgatcccaggaggtcgaggctgcagtgagccatgatcacaccactgcactccagcctaggccacagagtgagcccttggtctcaaaaataaataaataacaattcttctataacatagtactattataacaatatattgtaataaaagttatatgaatgtggtctctcactccctctctcaaaatactgtaatcttttcagaccacaggttactgaaaccaaggaaagaaaaaccacaagataagggggcactattgtgtgtaccataaccagggcatcacttcattatacctactttgtgtaaatgggagcggaagaggctgcccagaaagaagagctgagctttgaaagaagggtaggatcatgacagagggaaatagaaggagggggagctaaggggtcatttcagaaagcagaacaaatcatgagcaaaagccaggtgtgagtgtgaaatgacgtgcagtgggcagctggagtgtgaggttacacccagaagaatattgggagctaaaacctgaaagtgggcttagagcagagtcgtgaagggctttcatgtgaagggagatgatgtgtactctctggagatgtggggagacagtgaaaattattaaccaagaagaaatattgacatatcaccttgtgcttgagcatttgcatgtctgttttcccagataggatgtgaatgaagtgcaggaaggcagaatcacagttgaagttatgtttataagttcaattgtgtgcacattccccagcctaatgcaggtgcttaataaatttttagagtaaggagagaagatgcattggaaggaagggaggaaaatggaggaggaagaaaggaggaagggagagggagaaagagaagtaggggaggagggagctatactttaagaataaacattgtatatatttatatatatatagagagagagagacagagagagagatagagagagagagaaaatgggagactattacatgagtccagacaaacaatgagagccttcatgaagtaagtaccttatagttttgagttgctatcttgccgtaaaactcaaattctcatcctcctctaaatagcttttctataaactgtttgaaattagtgttaaatgttctcattcattgtgagtagaagggatctttgtgttgctttacccgtcctattagcgaatctgtgctcatccatcctatacttttgcctggttccccttagggacagagcatgcaattgcagatggccaggagtggagcgtgaccaggggaagagaagtgagtaactgacccatgggcctcacttgcaccttatgctttggcccttccgccgcctgctcactcaacagggcaacgtgtttgttatgcctggctgacttttacatcctgccagcccagacatactaaaaacctgaccttcaactcaaaccctcttaatccatgtgctctattatgtttctctccagattgagtggaatttgggtcagcccttggttaggatgacatttttcgctcttttaagattatgatttaatctgtccatctcagacctacctgcagtacttttctgtttatccagataacctttcagggctctccaagcttgtcatttcctctttaaccacatttcatatacatatttcctattgaattcctatagcacaccttcaaatcctggattcttaggtggtgttcattcacttcctttaataagttgttagttcataaacaaaattattttacagaatttttaggatatggctccagatgcatccagatggctgccttggcctgtacagttatatattttcaagaaaggaacacaagaatttgattttttagaaaaataaatctataccattcccccaaattaactgcagctccattgcaggctcagaggtcacatgatttataggtagtctcctagaaccctgagcagtggatcttgggaacctcagaaattctccagtggtatctctacttttgtgaacttaaccaaagcaagcacatgatacatgttaggtaggaagaataagctgaagtcatcaagtggccaatcaaattacagctccctacaattataattcctaattatttagtgaacatctgctatatgcaggttgctgagagagaagacaggaagatttaaaaaaaaaaaaaaagtcctgcataaaaatggttaccttctttagggagctagttggtaaaagaaccatccagggacacattaattgtggtgcaatgcacaacaggatgtcccctcatagaatttcaggagagggggcagttcattctggctgccatggatcccagcaagaggacagctgcactcagctccagtccccatgcagggtcatgttgccagaccttctggatgtggggttgtgttttgttttgtctttaagaaaaatggacaatacatattttatggaggctctcctgattttttagtcttgtcaacccattcaaacttttttcaagccctgtttctatgtgtggaagtgggacatccccgtctgctggctgtggatggccatgcaccatcagcttctacctctggactagaagtgaggttctcagaagaggtcagagtgtctctagaaaagtgggttgaagtcaaagtgccccccctcattctctaatattgggctgagcactatggtttaattccttgggctgagagatatcatattcccttctttaaaaaaattaatacgataatcctatctgtgttttacaaagataattctggtggcagatgggcacttggcaaatggcttgataacattagttaatttaataaatgagagagagagagtgaggaaggcaagagattagaggtcagttaaaaggcccttgcaccgccaggcaaggtggctcacacctgtaatcctagcactttgggaggctgaggcaggtgatcacctgaggtcaagaattcaagaccagcctggccaacatggtgaaacctcatctctactaaaaatacaaaaattagccaggcctggtcgtgggtgcctgtaatcccagctacttgggaggctgaggcaggagaattgcttagaccctggaggcggagcttgcagtgagccaagatagcgcaactgcactccagcctggggacaagagcaaaactacatctcaaaaaaaaaaaaagaaaaaaaaaaggctcttgcagtgatgcagacaagacaaaatgaggttaaacaaagggaaatgaaaatggaaaggaagtgataaatatggaaaccatctgaggggcagagtgagacctttgtggaggtcactaatgtagttccccaaacttccctggctctcccgctctctgagagttgacactttggcacttcctggtctccttgcattcaagtggtgccacgtgaccagtgctggccagtgagtttcaagagaaagtgatgggggctacttctggcccagagcattcaattctcactctcaaaagctctctttccttctggtaatgttcaagatagtaggtgctccaccagcttggccacctaagtgactacaatgagctgagccccctgatgatttaggacacgtaaagaagtaaactgtactgggatgttgaggttgcttgttatcgcagcataacctagcctatcctgactgatccatttctatttgccccttttgtccacattgcagtagacaaagtaaaaataatactattttacttctcataagcaagaccaaccatcctggcagaaatccatgagacatttgcagaaaacacttgtaatcatatagatgatgcaaccatattacatcctagccccattaatagtccagtattgtattgctttttatgaattttcttaggattctatttttgatgacccttttctcgcagcagagtgtagaattaatgtaattattttgttaaaactgtcagttgcgttctttttagcttagtacatatgaaagcctttaaaatgaatgcgtgaattgaatgactaatttgcacatcaatacaaaataaccaaattactcacccagtatcttcataatcctactaaagaattctattgtagagatggaaagagaaaataagagtgagaataataataatatttatgatatgagtaacttttagcattaacacgagtaacattttgctatacaattaaaatcattttattgcaggtttcttctcaaagaatctggaacagaattacaaatctggcaaaggtatatttttaatcctatatctcaaaatataaaaagagatgtagcttaagagacagtattatcatttattgtgtatcccaagcaaagctaggatccatgtggtcctagaatcatgtcttagatttcatctgtaaagtgaggaaatatatgctatctcctcttcttaaaaactaagcaagagccaaagaagtaagatctggaaaccctttttggcaaccctgaaattgttgtatatgaacaaaattgaattgcctgtttaggaagtttaaagttcagcctagataagaaagattcgtggcgatgtgagagaaattaaagagagaacatagtcagatccttaaaaagaagtctcttgctgtatactccagcttccacagccttctaaaggaatcagccactgcatctttgtcacttaactttttttaatctgaactgacagatcactggaaaataactgtagggaataatccccacactggcacaggggatggattaaatcaaccatgaaaataagcactggcccatgtgtctatagtctaaaagaaatttgagtgagcatagtgctgtgtttaaaccaggcacagtagccattgaattgtctgtaatattttctcctacaaatctccatttgaaggaaaagtcaaacactgatgctttgaaagccggggtgcatcttgctttgctgaatttaaggaattattttattaacacaggaatataaactgagcatacttctcccttaccccataccggtagcataatttttagtgaatatggcttatgggttctcttctaccttaatttttataaaagtaaaaatatccctggaaaacccatgctcaataaatgttagctctaattttaaaccttttaacctccaaggtggattggccttctaagaagtcatcaaagatgtaaataggtctttttcacattaatggaggaaaaataatgggattgaatgtgagcacttttttgagctgcttcctatctcacccaaatgtatattctgtccttaaactcatttggtttcaagaagacagtgaggcatagacagtgaatctcagacttctagaaaaacaacaacaaccacttggttatccacgtattggagaatttgcaaagcacaaagaaccgttatccaaggagagtcccattgtttctgccatgttcttcaccaatcctctgccaaactctgtaaggaaagaatactactagttcttgtgtgaaggcaagattctctgatggataaatttggtcccatctgctgagcaaacagatttcaaatcaagaatcaatgtttccataaacagtctatggattccttgcaggttatccaaacatcaattaagcaaaatcaaggaacatgtagaatctatccaccagaattaagtcaaaatgcccactcaaaccctaggagttctaatttgctattgcattaacacctggaaaatacttgaaatttgatgggaaaaggcagaagagggttatttaaattttttgtcttaaagaagatcttgttaaaatgtttagtattgatagaactgcatttttttctttaactcatgctgtaggcttattcgaggagcagaattttcataccaagctcctcacagctgaaaatccataacaatgatgctttcccagagcctggggagagttcagctaagccccaggttgtcctagttggtcagaaaagtcccagctccagtttcccacctttgcacactttaagaccctattttgtatttctttctcctttcctaccagactatctgaaatactttgccttcatgaaaactgcatttattaagaaattcaggacaggcatggaggctcacacctataatcccagcattttaggaggctgaggtgggcgtatcacgaggtcaggagattgagaccatcctggctaacactgtgaaaccccgtctctactaaaaatacaaaaaatcagcctggcgtggtggcgggcgcctgtagtcccagctacttgggaggctgaggcaggagaatggcgtgaacccaggaggtggagcttgcagggagctgagatcacgccactgcactccagcctgggtgacagagggagactctgtctcaaaaaaaaaaaaaacagaaattcatacgcacatacccacttaacacatatttatattttaacaccttcgtattttttatcagtcaaggatgtttattaccttcaaagtttctcttcagtgtgaattcgccagtttcatcacactggataagcttgacatatggattaacacatacaatcttcttaggggtaaagaagaatatcaataggcaaactaggtatggtggtatatgcctgtagtcccagctactctgagaggattgcttgagtccaggagatcaaggccaggctgggcaacatagtgagactccccactctaaaaaagaaaaagaattttattatgtttattttatattgaaaatagttcatcatgttctccagagatcctgatataaaatatataaatcatatatatataaaattctgtgtacatatatatatagacatatatataaaatttcttcatttgtaaaacagtcatgtctgacaacaaagacagtgacaccttcaggttatttctaagtggacccccccgccaataatattagttccatatatgtatgcattagtttgtgtcaaaaaaaaaaaaaagatggtgttccaaggtcaaatgagtttggtcagtattggatagaaaatgctaattgggtttcttttttttgagacagagtcttgctctgtcgcccaggctggagtgcagtggcatgatctcagctcactgcaacctccgtctcccaggttcaagcaattctcctgcctcagcctcccaagtagctgggactacaggtgcacaccaccacacccagctaatttttgtatttttaggagagatggggtttcaccatgttggccaggatggtcttgatctcctgacctcgtgatccacctgccttggcctcccaaagtgctgggattacaggcgtgagccaccgcacccgaccgaatcgggtttctttaatgctgaaattctagccattaatattctaatgctcactggatttccaaaaataggatgaaacatgcaggatctcccaaataatttttttggccattggacacttgtttttcatggaacatatgtggcaactagcatcctgtggaatagtcctagggaatatttcttaatctatcgggaacaaatatctattgttgacttttcaagagaaggttcatgccacagttggtatcatcagtggagccaaagatgaatttggtcctgtatagggtctagatctcagcctatggcaagaaactcaatttaattagtgtcctaggctggatcagaatatcacaatgctgactcaaactgaagaagatagattataaaaccagaatgcccgttttaatttacaaagagaaatataattgtcaaggggcgctaatattattgccctttgatcaacaccttctctacttgtaaaggacaattccatgaaaatccttatcttgtcagaaggttgcaagatgagtataaatacaggacttgacatgtcaatttattcagagatataatggccacatgtgtctacacagtgggatatgcctgccagctggaccagatagggcatggcctccgaccaccactccaacctcagaattggcttctgtgatgccgtctttctgtacttcccgtaatgactaaccttcatctgatagacacttagtttctgtcaatatgttaaaaccttcaccagttcaaggatatttagatatactagacagaaacaatgtctagtccatgcagaagatatgaaaacggttacttcatctcaatttacagtggctcaatattattttatcccatgtgtataattgctcatatcacagtgagactataagcagcaaataaatgggaagccatctgtgtctttaatatggcttggtgtaatatatatattatacataacattgtaaatctgtataaaatataattacatggtatatattattgtaaatatatataattgtataatatataataaatataataatatattattattatatgtctgtgtatatgagacagaaagcaagccaagaagacctgatatgattgtgctttcaccaacccattataaatttgctccatggaaattcatagcttgcctctctgagggcaatttctactttcttaagagtactttaacatggcctgttacatagtataaacacctctgataatagttttaaaatatatactttgattcttagaagtcatttgattcttaggcaccgaagtcaccgcccccttacggaaagtcaaaatgttttggagtttatgccccgtccccagctggaatcaatgattcactggtgttgggagaagtcaagggaatagagggactctgtgaggcaggataaacctcaaggtgtcatttatgcttcagagctccctggaatcaggatgaggctgggacttgccctgaaatcctgtctttgcttggcttcttgccctcccatcctgctgtcctcactcccctcctggtttttcttgggagcccttctttaaatcatttgcactcaaatccttaggtcagggtctgcatctgagagagtccaatttaggagacttactttataaggttgttgagaaaaccaatgaagaaattaacgtcaaatacttaaaacagtgcctaaaacataggaatttgctgttataatataaaatgtagccatagttttgaaactaatttttgtttaaattttttatcaatgtaatacatgcatgtggttaaaaatcaattcaatccacaaggcttctgaaaacatgctaagttctcagccatcctcctctccaccctcaggattactccccaggagaatcacatttaaccgtttctggttttaggctttatgagtttacctccgtatttccaaagacttccagtttatctctgtcttttattaacttgatatatcatctgttcatttcctgctatggagtatgagggtttagttcacttacaacatctctcactctctttttctccctgctccaaagagaagcatagcacgatttttagttaactgtataattttaagtagcatgtttaagtctctatttgttctgtcaactgcagagccatctctttactctccacgtagtaccccggtcctcccttcccctcctccctcccaccaagcattcccttccacgtggtcaaggatgatagcttttgtgttctcgtgaaatctttcatgctttgtttataggttgttccaaaaattgcaagtcagtaaacactcttgactttaatatggctaccttattatttcctgcagagccaaaaaaatacgcagtgatcaagtattcctctcagtgtggattttagtgccactcaaagaaaacacccaagtgcatcatcctttcatactccaccaaatgctcaaaatcacaccacattttactttcaattaagttgtttattttaattgacattgaaattgtacatatttgtgggttaccatttgatatttccatgcatatctatgttgtattcattatttcgtgcatttatcattttctcttctagctactttgtaatgtacaataccttactgttacccagtcaccctactgtgcaacagaacaccagaacttactcctcctatctaattttaagtctgtacccattgaccaagctttgcctctcctcccctgacccttccccactctctggtaaacactgttctactctctgcttctatggcttttcttttttagatgccacatatgagtgagatcatgtggtatttgtctttttgtgtctggtttatctcacttaacataatgtcctcggggttcatttatgttgctgcaaatgacagaatttcattcattttatggctaaacagtattccgttatggatatgtaccacattttctttatccattcacagttgctggacacttaggttgattccatatcttggctgttgtgaatagtgctgcagtaaacatgagggtacagatgtctctttgactatattgatttgtctttgtatatacatctaatagtgggattgctagattatatagtagttccattttagactttttgaggaacctctatgctgttttccacaaaggctgtcttagtttgaaatcccaccaatagtatgtaagtgttccctcttcacgtcctcaccaatgcttgttttctgtcttttagataataaccattttaacggagtgaggtggtatctcactccggttttgttttgttttgttttgttgttgttgtttttgaaatggagtctcgctctgtcactctggctggagtgcagtggtgcgatctcggctcactgcaacctccacctcctgggtccaagcgattctcctgcctcaacctcctgagtagctgggactacaggcacacgccaccacgcccagctaatttttgtatattttttagtagagacggggtttcaccacgttggccaggctggtctcgaactcctgacctcaagtgacctggccgcctcggcctcccagagtgttgggattacaggcgtgagccaccgcgcccggcctcgctgtggttttgaaaggcatttccctgataagtagtacatcacattttattgcacaattggtttatgtttgtttctcctattgtttctcataaaaccatgcatttgtttcttatgctgtttgtttgttttgccagaaatttcttattgcccttccttttgaaatcattattattagtgttattataaaaagaaatgtgtatcttctttaggaagtggctagcatcttttcatttcttactttttcttcagcattgaatccaacagtttttctcctggaagctcaatgacttcttgttttaatttggaacagctgcttcatatttggattgtgactttccctgacagctttgatttttcctgaattttcttgtttcttttttcacattctcagattcttccaaaatctgagatattttttcattactatggaatcccccttttttctgcagatttttccccttacagcctctgcccctatgctctgctgtggactggctgctgtctagaactgctatacagctgtcacagtggggctcccttgtgttgctctcttgagtgacttcaacgctgtttcctgggtcctttgtcttcctcttccttagttcataaccttattttgctgaagtacctattcaactttgtaagaaaaagtatgtaaggataaaattatgtaaagagaagatgtctaagtctttgtaagttccaaaatgggccttcgtctgctctggccctggccagacagttgagttagcaatagaattcttggtgggagataactttctctcagaactttgaaggcattggtcctctgattttagctatatagttttgctattgagaggtatgatagcagtttgatttatgtttctttgtatgtggcccttcattttctctccaaaatctttttggattttaaaagatctttatctttggtgtcctgcagtttcatgggggaatagtctaggtgtggattgtttttctttcatcttggttggcactcagtagacaactggaaggactgggaaaagcaatggagagctcagtgttttggggtgagattgtaggctgactggcttttttagggtaggtgagaggagaagcactttactttggggtgcccacatccacattagaatgttttctcaatttctttctcttacttttttgagattttaggcctagatggggttattctgcaggtggaaatagtggggaagtcagctgttccataaagagacctcagcaagcaccccctgggaactcatgggggacttgccacctctgagtgcttagcccccgcccccaacactttgctgagcaggtgcagctcccctggggtagtcctgcatagcttctacattctactttacatccttcgctttttatctttcctatttaatgaggtatctaaaagctaatattaggtctcagacttaacctgtcctaaaacattccagtaagtgtgccctaaaatgtcaacaaaggcggtagtggttggtgaattcccctaatttccaaaacaaaaggcactaaagaacactgggtgatttccagatgtctatttcttttctttccaaccaatgatcttgtttcaattttttttttctaatggcagaacaatttgtttaaaagaaatagtctcaggccgggcgtggtggctcacacctataatcccagcactttgggaggctgaggcaggcagatcacgaggtcaggagaccaagaccagcctggctaacatggtgaaaccccatctctaccaaaaatacaaaaaattagcctggcacagtggcacgcgcctatagtcccagctactcgggaggctgaggcaggagaatcgcttgaacctgggaggcagaggttgcagtgagccaagattgtgccactgcactccagcctgggtgacagagtgagactttgtctcaaaaataaataaataaatataaaaatagtctcagtgttggggagctgcatttgcaagctgatctggttgaaagtcaagggaaaagtcgcaccctccccacttgctgcagctccctgtagggctgctaggagccccaagggtaatggttcccaatcccctgaggtaggtctttagaatgcagattttgccctactccctggaatctaatttccttacaagctcccttggtgattctggtccacaatttgagataggctgctagagttggcagaaacaatcaacctaagaaagaagcttgggtggctcagacaatacaaggaaatgtgtagggatgttttcattagaagaatttatctttattttcccctgacatctcaagagacacttagatctctgccttaaatgcaaaagaagcaaaaagacagattaaggacatgtgtagcaatacttctggagctgataacactgaccatatgcaagatggtcacacatcatagactctgaggcagaattgactttgcttgtttctgacattgttgccaagaataaagacagaattctgggtacacatgaacataaaaatagaaatagtagacactgaggactccaaaacagggaggattggaggcatatgacagatgaaaaattacctctggagtacaatgttcaatatttgaggaatgggtacattagaagccaaattaccactattatacacaatcgactcacgtaacaaacatgcacatatacctcctgaatctaaaatttgaaaaattaaaaaaaaaaaagaataaaggcagacctcccagcaagttttcaccttctacactttttcaaaatccccagtccgcagccatctaccttttcccatcgactttgcaaaacttccatctgcgggtgcaggctagggatacccttactggggacaccagaaggggtttctgatttgcatccttggttcagctccctgagatattcttacctaatgggcatgtgtggatgttccatttactaattcagattcctccttttgggatgttcaagattcctgttttttcttcttctagagatcttagtggggagcaaaagcacacaataaatacagagttagggaggcaaaggctacatcagggaacacaggtttttccatgggcccattgattctttacaactggggctgatctgggagttgcttcccccagttagggacaaatccagctggggaaatcttagatgccaccccggagatactctagagacaatatgtcacagagttctgtggacaaggtaaactgatgcctagttactttccttaaactggcaccaagcctgagcacagagctgctgccgccctatgtctaagcatggaggaggcattttcttaccatcaaggtaaactagtggtatgaataacatgtaccatggcccttctccacctcccttccattcatacctctcacctcccttcctgcaaccactctgttgcttataataacagccatgtttctctgttccttataataactcgtggctcatactcaaattagcatctttatctttgaaacacacatttacatttctcatcagcaggctttaaacaaatgatttgcctgcagtaggactgaggtacaactgtacactttcccaggagccgaacaagcagacccttcaatttaggctcaataatgagatacctgagccacctcttctcacaagcacagccacggagcgcatctttctgcatgtgagcagtcttctgtggtcaaacccttaggagaaaattggttgcctcatcattacaaataatcctgtcatgtaagaggttttgggaagtgcccagggtattcactggctgtgtaaacttgggaaggtcacttaacctttctgagactgagttctatatgtataacatggcaataacaccatctatccatacagttgtcttgaaaagctaattcatcatattaaatgaaggtatcttcaaactgtgaagcactgtcttacttttaaccgaaatttccttggctgttctgtgcctgctcagtgtccagcttccaagtcttccccagcatttctcgaagccattggggtggggtcttgtgtgcacctgaaaatgagtccacagttcccaacgccctgccctgccaatcctgtgcctttccagtaggcacaatgtgtttctccctgtgccggcatcctggccaaggctctcctgtggctccaacaggacagcccttgctggtggctgccctgacccctcaggaccataaagccatgaagagcaaaggagaagtatgctcttgccctttggcttcccagggcaatgtaacttggtccccagtgtgtgaatatagacaaacagctcttttcttgtagtacaatacacataacatacaacttgccactttaactatttaacactttattaaatctattttaactattaactaaatgtatgattcagtgacattaagtatattttcagttttgtccaaccatttccactgtctagtttcagaattatttcttcaccttaaaaggaaactcacacccactggcatctcctccccatcccttccaccttcagagcctggcatccactcctctgccttctgtctctatggactcacttattctggacatttcatatgaatgaaatgtggccaaggctgtctggcttctttcacttagtgtcatattttcaaggttactcttcttgtttttccttggtgttctttctctccttaggaccaggcttgcaccgaggggctgggatgaggatgggtttggataagcattaccacaaggcttctttccaggattcctggtcactttcagtgataagccctgctgcttccttcctcctcagcgtgggttttctgccctctgtaaacatatccagatgagtctactccagctcccagacatacctggaggtatgtgaacagcagtgagtaatggctgttctccttcctaataggctttcacacccaatccaccagtttgccagccatgcccacatttgcctgagcctgagaagtccaagtaaatgctgaagtggagatgctgactagagtgcttataatagtatggtcttatattttggcataaagtaggttaggatgttgctagaaatcatacttcctttagcatttgagcaccatttttccttctgtacattgctaagtatagaacacatttgtatttttccagaatcttccacagacttgcttttcaagtgcttttgacttttcttgtgtaaatcccatccgatacaattctgctacctctgatgatgtggctccgtttatgtgtaggggtttactgaggaaacttttaacaaagattcaatatgagaaattgtttacaatttacagctaatatatagaaactgaacaaattgagaaatgcaggattcttggcttctttgtcatgttaaattatttatttgggaagtttcaagacacggctttaccgtaactctctcttctctctaggaaatttggtttgatgaaattttgttttgtgtttctttttcaaaaatttaaagtaaattttcagaatgtatttctgtgtatcccttttcctttcatagctgctgtttctgcagttaaattttacatttaacattggcctatgtcgtgtatagtaacaagacagagaggaaaccatcataaaagggaataaataccagggaagaaagtaaagtctttaaccttccctgcttagggtcagaattttaccccaacaagcatcattttatctgcaaacattctttgtagttcaaatattaatacatccttgaaccttcctaactgtactcatcttattttctcattcttctctgtcatatttcactatgctttacacaatgagccacttcgatgcactatattttcacattttttaactctcattttcatgttagtgtgtaggtggctttggtgtttttcagacccaagttacgttcatatatgcccctcctgctttcctttgcatctggtgtatacctgaacatatttaattctgtattattttttgcttgcagatgtcaaattagtctatgtaactcaaaggcttaggtttatgcctttccagtcaagctgctgttatggaaaacaaatacccaagcaatatgaacttacggatatggaggaagggagacatatttgggaccaaggctcattagtaggttagggtctgctgtacctacccgtctgccaacatctatctgccaatattcccagactttcctgtttctaaatgctgatttagataaatgcttttctaaccaaaatgaagcagtatggtatttaagtcaaccatggaaataagcattaacatatgtgcccccacctgaaagacatcaggttaggttcgatttgaatcaggcaggaggccagatgcaatcaagtccctgaagtctggaactccaccagaagaagagatcaggctcccctgccccaggatcctccagactgcagaagatctagggaggtcagaatagagcagggctcccacatctttgataaaatgtgattttgtaaactagaagaaagggggaaatggcaaaagcaggcctttctctaaaaggtctaataaacgggatgatgccggggtactttccaggcctccctcatgccatctctatctctacgattacatcacaagccccagaacaccctggctctacacgcaaggcaggccacacactggactgcttgcatagacctagagcagttcagtggctcagtgaggacttgctatcccaactggaccaagttggaagccctacatggtatgtgagatcacagaattggtatttgatacccctggaaatggttgcatcgtcatttcaccaatacagctacactttcctctaaggcctgtgggtttgacattgatccttatatgtttatttgttcatgggcttgttagaaagcttttagattgagatttaggcaaaaaagaaagtgaacttggtttttagccgtaaatttctctagaccattcttaggtcaaactaaccagcttccttctgcagaaattgttcagtgctacatgggcatgtgagaacaaattttgcgtgctcagtgctaagacactttctcccaccaactctacctttctcataacaagatcttaaaagatgatttcattccctcagtccttaggtgctgtcctgtcctcaggtgctgatgtctaatcaccacactgtttggttcagtcacctgctatcatccctccagtttaggggttctgtctctttaatcagcaggcaaaaaattcagactcaggcttttgaccctgcaaaatggagaagcatgtactgcttttgaatttttaaaaaaaaaaaaaaacagttagaaatttgacactaagacatctaagcaactgggtggagatctgaagtagcaagtgaaaatgataccattaatgatattgatgatggatgtaaaggcaattgcaaacaattggttttttgttcttaactccagtcaaacacttaccaaaacaactaaactggttggacttcaacaatctaaatgaaatcttgaagcatgaatgtatttcccatgcagtatggaaaggaagagagagagaaagtagttaaaaaacaatctccattcctaccacacacctttggcttgcattgttcaccaccttttaaagtaatgcctgatgtgttatatgctggtcctccagaaattctaaactttccccagaagtgacctttgttctcccagtgcctcacaacactcttaaataccaaagagcttcagggggcaaggacaagaattttctaaaggaaacccttctccacttgcactggacaggctgtcaagacccagcaagacactttgtcatgttatctcactccacattcgctttctctccttgtagctacctcatccctgaactcccagctccagcagctccagctccagctccagcagcagcagcagcagcagcagcagcagcctcccccgtcaaccaaccagcacccgcaaccagccccacaggcgccctcgcagtcccagcagcagccgctgcagcccaccccaccccagcagccaccacccgcctctcagcagccgccagctcctacatctcagctgcaacaggcgcctcagccccagcagcaccaaccccactcccactcccagaaccagaaccaaccatctccaacccagcagagctccagccccccgcagaaacctagtcagtctccaggacatggcctgccttcaccgctcacgccacccaatcctctacaggtatgctccccgtgcttcccgtctgcccctaggagcaccaaggacctttccatggggtggtgccatccccaaaggcagagggaccacacaaaacttagcatccagttctgcagcatctaattcaaattgatctcttagacatagggaagaagaagcaactagaaggcaactggggatgcatgtaaacgaaacaaatagaagcccatttctgttgccctccaaaggataaatgttatctgtttccttctgtgagaggccagcactataagtgcatttggagcctgtaataattccattttatgatactttttgaaggcagcaaagatagcatccaattaaaattattactagcacagttttgtagccccatggagaactgcatctactgtccatgaggcatggtggttatttctctatattatgaatacaacagtgtctcaccttaagtactttgtgctcttttgtttctatttttctaaagactctctggggttaggagggcaaagaaatttagccccagtcttatgtcccagattccaaccattactccacagactaacaagtactctaaattcatgccaagagcctcaaccaatatgcatctttataaaggaataaaacttctataggtttactttattactgtgaggctgagagcttcataaatagatatttcaggctaaccatgagagctcatctataacctacctattgagaaggaatggataggtgcattcatatatatatatatatatatatgactttaaacttcagaaaaccatttttaacttaggtgtctttaaaataaattagcttcaaaacataatgactgtgatgtcatcatatcagatccagaaattaataactcagccaagccatccattctttgacttgcacaatgacatttttccctgtgagatttcagacaatctcgtgtatttgtagtactgtgacaaagttaaacagagtgagcagcctgtggacctgtttcaagtgccatctcatccccttgccatagtggtgggtataaacctcagtcagtccggctctccccagcctgagaatgacagtagcgatggtatccttggctcctaaatagaaaagtatacaaaataaagacaggttggtacacggacagaaaggcaggtggattagagacttggtattttagaacttagtttgttgtcccatagctttgtctcttccaatttggattctcagtggtgtggcccaaagcattcctagaaatgaacacatttgggagagatgagtcattgtgtttttctgggctcttgggccagggctactttcaatttgaacattttcatgagtggagtttcaagatgtatttatacaattcttacgatggtgagacaacgtaacacctttgacctaggactaaaatgaacatggtccaaaaacgtcttcattgtccacttgacacctactgaaagagcaggtgtcatcaaatttacagaaggcatgattacagcaaccttaatgttggcagcatttgggattcaactttattattccaaaaaattaatttaatgctttttaagaacacttacattagatgtacctatataccatctaatttctctattccaggcaccaaaataggtaaaattaccaaagaaaaatattgcccttccttgaggagtgaaattacttaggtgtgtccccagttgtccgatatagtccagtattccttcctgttaggtgaaagttttgagctctgtggacctcagccttccctgaacactgtcagtgttttataaatttctgttggccagtgagatcccagtgaagacaagccctgttgaatgactgttgacaggactttagatgaagtgaccacgcagcctcatgaaaataaacttaggggaatttccgaaagttctcctaacagtttctcgtggaaatcccagggctgtttgttttgttttggttttgcaacaaatgaaggctcagagctacatttctttctttgtaacactgagagaatattctaatttttcatttttgaagttttaacttataaacttaataaatatgtttagagtacatttaaatatagaggagctgttactctaacttctgtggatctaacagatgaccaccaaatgagtgacttgctacaaattttttttaaaacattactgagaagatgttaaacaaatctgtgtcggtaggcataaaaggacttttttcctttactacaggcatgtataaaggaaatagagaatattttggtttaaaaaaaatttttacactagctgcaggctttttgagtttgtggaacatggaatgtttgaactttttaaaaagaaaactgtttaaaaggaattgcaaagatatttaactctccaaactaatgatctttataaagtgtttttgtttgaagattattaagggaataaagatcaactaaattcatgtatgatagcctaaattttattttacaaccctttattttcatgtgggctttatctttttacattattcaaaaatctgctggagagatattagtttagaactatgcaatgtagattaccagggaaagccagtcaattaggttttttgctttaaaaacaaaactttggaggacaacaattatttctaaaactgtgcagatgctcccatatctttagaaaaaaataaatgtaagtaggttgtgtgttatatttgggtgaggtcatttcctgagatgaaaaaaaattaatagtgttggtaggtagtaacactctaaacaaaaattatccaaatacctcgtatcaggcttttctgcaatattgcagtgtaattttattttactcttttactgaattctgtgaaaaggattacatttacaaaaccaagttgttttaagatagataggagtctaaagtattatcctttcagagacgcacaggtagggggatcactttgtttattaattttgatcactcagcattataggaggtctggtggtctaaagcagactctagaagctgcccctggagatctgtctatagattctccattgagactcaggacccacccacccatggcttcgttcttgcccaggaggcttgaggagagaagttctagacaggaaatgcaagggcagaggtcttcagggcctagcagtccctgtaaataagtaaagtaatcttggttgtagaacccaaaatcaaatttataaaaacagtgtgtgggacaaacaagatgcactgtgagctgaatttagtccttgggtgccaggatggagagcagtccatactccttatttttgctcaaacccacagtccacaggctgtgcctgaatctaaaactaaaaatatagactgtgtttgatagaagcagaaacataaatggaagcaatcttttggggcaaaaaacatgatctaggtaaaaaaaaaaaaaaaattcaatacgtaattttaatctggatagagaccccataagcataagaatggtgaaataaaagcctcctttctatgacctttaagaagaattttcttgaaaagaaaactccttgggagtttttatttgcactggtaaaatttcagacatcttataaaagccctattgtgcacatattccctcttgagtggtctggagatatgctgggcatggttggagcccagtcatggtgtaggtggaagagggtaaccggagggcttgagtcccccttctagttctgaccctgcctccaactaactcataactttggataggtcactttagctctctggacttcatttccctcatccgtgtggtctgaggtctttttcaggcctatgaatctataatctcaatgttagtaggcctctggaattttattggctattgaaaacttgatggtcctgaagattctctgagtattcttcaaggtcaggttaatttcttcccactcagctgggtggcagagtgaaaagagagtggaggacaaacataagtgggataatgatagcagaagcagattttatcttagccagagagtccaaattaaagtcaagtttttatcctcagagagtcactgctataagctctggtcccagattgcttttccacacctatacattagagaagcttaagaaaccaaatgctgcatttaaccttggcctcccacgtaccatcttgcatggcaggacgcaggataatcttttccttttcttgttctattgcacattttaataaataacagagggagagagagatcagtaggaattggacagtgaaaactatctgtgcttatatgaggaatgaggggcacggtcacctcctcggaggtgaagttgcttgagagcgtgaaatgtattctcaaccatgtgcatttgctaatggaaaggtctagttaccactcaggcacagcagagtaaaactgcatcggaatcccacctctgttgcgcagtgggcattgccttctggtcttcccatttgagatattttcccactggcaaacttagtactaagttccaaagtgcatacataatgggagaaggtggtacattatcactttttaaaataaagagcccaaagccttgggaaggagctagacctacgggactttcaagttctctaaagcaaatggtctccaatcatgggtctgccctatggaaaagacccagtgtcctaggccaaaccccctccccccccagcaattagtcttaatcggtttaccacaatattactcaaggctctgtgggactaggtttgttttttcatctataaaagggagggggtaaaattaaatactttctagaactccttcagttccattggagttttatgttacaaacccctaaaactgtgtagagttgggtgactctgtgggtgtattcatataactcctttgtgtggctactgtaaatatagaactcagacatctctctacctacacagggctaaatcactacgcagaattctcctagccaggactgagatgatggtgaggcttggaagcactcatctcagatgcagaatttaagggtgtactcaaaaattcagataatgtttgaatgaaatattttcaaaaatcaaaatgaacgccaaaagtctatgaacaacaaaatttcaaatttttaaatgcaggatcagtaacagtattgagccatattggagtctgaggcaaaagaaaaaaatcagtcatatgaacatttagtgatcatgaatttttggcactcattcttaaaatattgtagtaaggtcttattcatcttgattactacgtttctggacacacctttaaatttggttcctgaaatgagtgcctcattcatctcaccctcatccctctcagctttgctactggctgtctaaatgatttagttagcaaaaatccgccaaagtcaatgacattctgtccattgtaaatttcggccaggtctttgatctcactttctagttgaacttgaacattgcaccaaattttgcacagtagaaaaacaaatgcatgttggataacaaattggggcaaggaaggggctagaaatccatcttcttcattgcacagatctaataaagcaattatttttgatggaactgaaatgttatgacaatcaaataactcttttggctgacatttttcactgaactaatttatgattttatgaaattaagtaagtttagtaaaaataatggaagtatcactatgtagacaacattctctcagagcaatccgagttctgaggacctttggaaaactggaagaatccacatggggtaggcaaggtttcctcttggctaaaaagccaaagaaaactttattactatggaaaagaaaatccatctaagctcagagagttatgaaaatcaaatataacatactgatgagaatgcttttgtatgctataaatttgttaagcaaatgttgattagcctaaagatataaaagagtatgaatttatttctgtttatactaccttccagaaaattgagggcttcattcatgattcactcattcagtgagagatcgggtgggaaatgagaatccctttacccaactgtattaagtactgaataaaataaacataacatatttatccatatactctgcaagggacaatttttccttttatgaaagaaagaaaatctcctttaaaaaactctcagttcaacattactggcatttcaaagaatttattacacgcatttgagatccaggaggaacaacaaagtttatattgctttgagagtggcagggaaaaaattagtttaccaagaatctactcatatactgtagtgcttctttgtcgttgtctagatttaccattcctgggtactgctccgtagattagtcaaatcatgtagaaaggggtttaacaaagcaggaagcatgttcacaccactggctatggaaactcacgtcaagtagcgatagatgatgagggtgccagactcaaaggaggatgggaagattcttgcagcgtttgaacatggcaagtgatcacttctcaaagaaaagagaaccactctgatcctgacagtgggggtagagcaatggtctgtctgcagcaagctcagcaaagagcctagagccacatacactgtccagtcccttcactgttggatggtggttgatgaaactaatcccaaagtctagctcagaatgcttctgaaacagttttgccttcatgtgcatagatgcagggtctagtggcaatttgagatgcccaaaatatgccggctggcactttgctctgaatgagcagtgcttggccagtatttatgtgaacttaatacaatattctactgctttcatgatcacaagttatttctcatcttgtagcttcaattcatttcccacaagtttggggtaaattttccactggtttttaaattaacttccaaagcatagacttgcaagtgaatattctccacgttgtaaagaaagcacttttatcatgatttgtaaatatttactgagcacctgtgctgtgcattgtcctggagaaggtttgcagaacagacaagatgatgcctcagagaaagtgtgatcttgagaagcagatgggcctgggtttgaatgctcgctgtgctggacatttgagtcaagtcagcacatccttctgagcctcagtttcctcactggtcagacagttggtgtggggattaaatgcaatggcttatgtgagggtatctaatttggttcctgatagatatctggcactcaaaaaatgttagtatcctgcctactttttttccatcctcgactatagatattataacctgttggggaatatgagacaaacacatgcactcaaagttgaacaaaaagcaaatagtcacaggaatgtaaaaatgcatgtgcacacaataaaatgatgccctgcaaactacacaaaaacccatagtagctagaatgaggctaataattgcatgtcagtttcgtagcgtcatcctgagtcagagaggtacggggcatttctgaggaaaggggtgaggagcacacacagtacagggcaaacctacactaaagggcatctcagagctgtggagctccaaggggtttagaacagaaagaaaggactgtagccatgcactcacataatgctaatattgcctaatcatataatcttaaagacttccaacttaaacctcagtttccccatcaatattattattactattattattattattattatttgagaaagaatctcactgtcacccaggctggcatacagtggcacaaacacagctcactgcagcctcgacctcccaggctcaagccatcctcctgcctcagcctcccgagcgtctgggactacaggcatgtaccatcacgcctggctaatttttgtattttttgtagagatggggttttgccatgttgcccaggctggtctcgaactcctgggctcaagtgatccacctgcctcagccttccaaagtgctgggattataggtgtcagccactgtgcccagcccatcaatattattattaagaatgaagaatttttttattatacttgatataggataaagatgccatcacaaattaatagggaaataacatattgtgtagtagtcaatagttgggaaaattggtgtacagatattaggctgggagaagacagttgttacatctaaaactttcaatatatgaactatacataataaactcttgagaaaacaacaaaaacaaacaaaaaagaaccaagaattattttttccttgtaaattcccaaagttgtggtttttagtatttgggtaaagaagaagaatcttgatgatctcacttctgccaataactagatcgctaattagtgaccatgggcaagtcacctaatctctttaggactcagttgtgtcacttattacatgaaaagtttatattagatgatctttaaacccatttttatatacttatttcatgcattggcctcatgagttcacagttctaactggagtaaccatgatcctttacctatgtatcttttactaagttctttggtctctctttttctcatcacaacccagaagaagctaaaattgccttcattccaacccaaagaaactaagtctcagaaagttcaagcaaatttctcaacatcactaacaacggctgaattgggattccagatctagtctgtctgacttcaaagtgtctctatttatatcttaccacctctgcgatgttcattttggttattagtgaaatatatattcttatttccttattggctcccagcattttccaagtcagcatttctcaaattttcttccacaaaacactgatccaaagaaattttattaaaaacagattccatggtgggtaggcaggtagaaagatagatgggtagatagaagtgctgcatgctatatcctgttcctgtatattttgcaaagattatttgaatactgaaggctaaaagacatcctgcagtagagatgtctagttaacacgatttaaccaagaaattctgaaacctgtgaaacctctagagccttttatttcacataatgctaattaatatctcctgtgaaaaatccttcaggaaccactgctctaaagcctccttaattgtggggtcagcacaactaaaataacctccatttccttatccaggacagtatgtagaaatccacagactaggtccaataggctgggccgtggagaaaaccaagtatagaaaggtgagaaaagagggaaggaaaaacttaaaactaaggcaagagacgagaaagctgaaacggtatggttctgataattgacagtgaggaaaatcacttcataaaatacctggctgggttgcttctcgtggcagctgaagtcttggagaccttctcttccagatagtcctcccttcttccttccttttcttcactgcccattgtctctagtgctcacacaaccggagtcctgcctcctcatgccacagcatgagaatcacggccagggtgcccctggaccacgtagcccctgcagacccacgggaccgacagaactgggagagtgcatgccttctccccttctcacttgcaccctcctcatcttttgactgaggaatttccaatggtcaggagatcccccagcccctggcaccctcattctccacccctgcattttaagagggtctggattccaaacaacagctcacatcagcctgaaatctgtatggtaagccaggactaagtcgtctagagcaccaagcagtcaaaactccatgtctgtggggcattgtcttagttacaaggctcctatcctgctctttttctatttcctgtttttaaaaatagactctcagaatcactggtgttttctttctcttttgtcttccactgttgagaactaaattgggcattctggctgaaaacaccagtcctggggccctgtgagtgcagagccaaggcagagaaaggcaccatgttgaggcatgcaggacaggttcatgtgccacttggagtggctgtctcctggatagggcaattctgtgtccttggccactcggtagggatgccttcatggccgcagatgaatgcagcagtggaggggtgccctgcgtttgtatgctgtcagctctgtgctcagaactagtagctgtgtctgaaggctcagttgggctccgatcaatgcaacccttccagcccgttttgtctgaactgtagttcgacagggctcagcccagcacctccacttagttttctacaccaggagatatttaactgtcataaaaaagaagtaaagttagagattcctttttttttttctcagctggactccatatcctgccagagactagctgctctttccagacatgagttctctgtccttgtattttgatgttgtgactgtggcgtttaaagagaacaaagcaacatttaggggtccggggagaagatttaagagaaaccctctcacttcccccaaggaaagctctctggaatctggttgtcttggaaacttggttttttggggtttttttaattagataaaatataaataatcttgaactcctgtctaaggtttaaaaaaggaatattccttagagcagttctcacctccagtagtctgcactccatggaaggaatctgaccaatctaaggctaaagccaagtggtctttgggaccaacctgaggcagaaagttatgaaaggcagaaagcaaaaatggatgttttccaagctccctgcatgcaatgatcacattaaagccatttgacacatcttcaaggcacagcctacatgttattttcattgctagtgagcctctcaagtgaaaaagtgagtatcttcataccagaaaggaagacctgcatgtaatcaaatattttcagggccactgggccttgcctggcaggtgactgtctctccctcttcttgtctcacccaagccacaccatcttcaaacagctgagaccacgcctgcgctcctacagccatattttgttcaattcctttgtattcttttccaagagaagattttccaagtttacagcagtggttcccaatgttggctgtacgctgggaacacctgaggagtttgtttgcttgtttgtttgttgtttgaagataccaatgccctggggcccacccaaggattctaatggaaccgcggtgggcaccagcattttttaaactttccaggagactccgtgtgtgcagccagctttgaggacaactatgtatgatcttgtaaataggctgccagttattcatttataaagaacaaaatcctaccctttgtttatgcaaaatgctttttgccgtaagtattgattgcatgagtcagcactgactttattttatgatataataagactgggtcttcatttccaaaaaggatgagccagcatcatttgtgctctacccctccccagattcacagcccatcaggaaaggaaaacaaccctgtctgtgctttgtcagccacctgggcccctcccagactctggagttgaattattagcccgatatctgcagaaaaagttcaaacctggtgattcctatttgatatttaaaatataatagggaaagtaaataatccttttcataatctttaacatcttctcaaaacaagaacaattgctactgattgagagcccattagatgccccactgctgctagatgttgtctcatctagtttatagtagggcttttcaaacttttatttgcatatggatccacctgaaatgctggtaaatgtagattctgatccagagcccaccccagatgctgcatttctaaccagctccaggaatgctgatgcagcgggttgctcaccttgaatggtaaagtgctactcaatggacccaccaccctcctgccccagtaccaccagctccatttcacacatgaggacgttaggtgtgaggacttgtaagaagtgagatttaaactcagatctatctgatgtcaaaacctcacccactgcgcaaatctgcctcttgttagtcttttctcatggtgggagtttcctccttctaaagtgatgttatttaaattacatgactcctggagtcatggaggtagatagcactgttggaggaaagactctcatttgcccacctctctgacctttcttgtagcttacatctttctcatagctcctgatctaaatcttgattgattattgctcagcaatcagtaactctaagcttggggttgaggacaagtctgttctttttgtttagtaaatatactagttttgttgaagccatttctacaaaactgaaacaccagtgcagcgattaaagtggtctgtggccactaactaaattagagctgagatagctaacagaaaccctgtgagaagtcagagggtcttatgataatttgtaggccccaaatcaccttgctataggactgtgaagatcacacatacctgtccccactgtctttcatgcagcaatcacagtgcatttgagattgcctgcctcagtgaggggaggcggcagcttctcctaacaccatagcttcaacactctttttcgagagcaaaacacaagatacatgcaaaacagtaacaaaatgatccttaaaatgtagaggccatacacagaatcagactgtggttctttttacctgatttcagatcctgtagtggtggttcggagaaattccttaacctcttaagggggcaggggtgcaggagaactgtgtacaaaatgacattcatagtaagcatactccagtgatatgtttgttttcagaaatagtcactcctgtttgaatggggaatttactttataataattggaagtgctgccatcattgcaagacaatggtttccttttttttcaattttcatttttattttatatttgggggtacatgtgcaggtttgttacaaaggtatatcacaaggtgctgaggtttgggcttctattgcttccatcacccaggtaatgaacatagtgcccaaaaaaaggaacttttgcagcccctgccccttcctacccagccacctttggaagccactagagtctcatgttccccccatcttttatgtccctgtgtccccaagatttagctcccacctgtaagtgagaacatggaatataaaaacacgttttcttgacaaaatggaagaaatgtcttcaaaaacacctgccctttcaaaggtcttggcctgactttgcatttcctgcaaggaggcaggtggacctaggaacccaggcacagctggacctttgtccaatgtctgcctgccccagattggacgggcaggtcctgctgatgatgggctttgggaagaaatctcattcacactttcatcttcaaagaacagaaacctaccggaacttgtacaaatatcagcctaaggatgcatacatgaatgcatgggttgacctaaaagaaaacaaattgggaaaataaactcttatgtcctgccaacccccacccaatatgtatatagttgtctccttgcactaaagggttaaactattatgtacatgtgaacgacaaatcctcatagtcacttacatgtattttcaatatttgtatgtatgcatacttgcgtttgcttaatatatacgtatgcatggatttatttaaaatgctttaaaatttatttaaaatcatctaagggattctgtaaagcatccacttatggggtgatccatgtagtttgggcaaatcagtggaatggggaaacatgacattgtctagggcttttcttcctttcttttcctgcctgggacgttttgagagaatgactaagcagtgctggagattatgaatttgcttaagtgtgaatggctgattgcccagcaggaggcccggccctccccaaaggtgatggactggggctgcaggtcttcacacttgatgcctggatttgactcggaaagtctgccaagtcttttactcggaaatttatcttaattagatctgaaagacctgccacagcagaatagtcacaccgattaaaatgaaaaacaggagaaattactgatcaaattaatcataatgtcgggttacagctgtaggtctgatgtaatttgccactccagtgagttacatcggcccaggcccgggaaaggaagctggctttacgctgatccgtaacacccgcccgctccaggcggcccggcaggaggctgattccattcatttttcctggcttgctctgacctccctgctgcaactggaaacaaatcaggcaccaaacaaatgggaggtggggggaacagggagggtaaacaagaaatattttcttttccaagagactgtactattgtactatttcaaaatggtgagctttttaatctcagccgggcgggcctggggccctgtgcttgtttggctttgtgcttttgttttttccatttaacctccttttagttttacgtgtggtgacctgacattgattagatgcagagtgggaatcaaaaggtcagaggacaaaacctttagctctgagcaataggaaaaaacctttagaaaaatctccttgccaacatggttcttcaactaggacatggattgaaataatctaaagtgtcacaagagaggaagaagaaacctaggctgtgagatctgattgttccaacatagatatggtcctggtgttctaatgtttagataaacaccactttataccataccatgtgttcagggttgatgtggacggcgtatagtattttttaaagaaaacacatcagagtctagatccttttcattgtatctccttgaatctcactgtagttaattcttatctccccattagagattcaaaggagaccctaaaacacaaagaaggagacccagtctagccatttcattaggaattctcagaagttagaatttaggaggaatgtaagacttcttgctaactatttctgctttatcaggaaactagataaagagagttcagcctttcctgaaggaaatcatcttaaaacagagattattggaaaggagcagggagaggaggtgttcttcccaatcaatagttatcagttgcctttggagcagtaagagctctcttcttgaccatatgataggttgcctaaatcccatttattcatcactgggccagatgtttatactctctgcccccagtctgacaaggctctccctcccaccaggaatgaatctggcacatttttaaaatgaggatcccttgaaccaaggaataggaagacaggcagtcatggaaacaggctggccctggcactcaagaggctgtgccttggacctttctagggatccttgtgaaggattaggtgggaccatgtgcccagattggggaagggcatggtgtttttcatgacattgtgagtgattgctaaattggtttagtagtttgtaactagcatttttaaaagaaaataataaaaaggagtagaaaatgccagagcacagaaaggctacaaatttttttaaggacactttcctttaagtgatatacaaatgaacatatatagttacatgttgagagatagatctaattgtacatatatattttgtatgtatatatgtgttggcctgagatgtaaaatgtgtttcttcttatgagacaagatcagaagaatttgaaaaaccctagcctgaaagacccagcttttcaggtagacagagatgggatttcttaggtgtatagcaggccaggaagcaggtatatcagtatcccaacatattgcatgtgatatgagcccctaaacaccaaacacccttcccaacagtcaaaaagaacgaaaaagaaatgcccaccacccagccccccagccttcgcccacacacacgtatcttccagggaacttcaagtttcaacattataccactgcctatgtggttgaaaacacacagcagattagtggtttaacaagcctattaaaatgagagactaagtaatatattaaaagctgacaagtagtcccaccaaaaatgagtagataattctaaagagaaagtgaaagggaaagagaaacagtgggaaggaagcacagaaccccacagggattaattggctaatttaggcccctggaagctgtgtccctcaggaaggtgcaagtcgaaggccaggtccacaggcccctggtcagagaagtcaggggctgtcgagcttcacatccaaagtacctggaacttttctcacttttcccacctactctggccccaaggcagagctatcaccatcttccctaacttggtctttctacttctgttttctctctaatccactttgcaaaccactgtcaagttaatcttcctaaaagaacatttagtttatatcacctccatgctcaaaccctctgctggcctgtttagcctggacactctggccctactcatcaccccatcctccaactccctctgccacattcaccctggcctcccaccatgcccagatgtgcctgacacaatccctccctcgctttgctggtccatgccccttgcctggaatgtcccgtcttctcatcactgacccctcatggctcacttcacttcctgctccttccatgaagtgcccacagtggcccagccctcaacaatcactttcctgaactcgtatattgggcacttagcatttgctctttaagtctttttcttttattttcatcttttttatgaacaatttattatctcatttgaattataagccccttaagaacagacacaatgtctcacacctctgtgtatcccagggctgtcaataattgttgtatgtgacgatttctgatttaacaattattcatgtcacaaatatgtaagtgcctgtgatcagactgtcttaaatttctttgcaaaatttcttgacgaagataacgatgactaatgaaagaagagctatttattgttataattagaaccatgcttggcacatcataagaactataaaagccttagatgctacgatgactcctttgaaattgtttcaaccccatccttctctgcattatcttcacagtgggttttgggaaatgggggcttgatttaaatgctttaaatcagtttattttatctgggaagaaatgtacatcaaagtaaggaccatcattttctaattaatctgtttccttttccctaccatctcaataacacatggtagttcttgctattcagaatataataggcaaagaagcaggtcttgttaatactttatagatctgattgatccgtgggttaaatcatgttacccaaagcataaacatattataaagaagatagggagacccaaagaaaatgaaaatggatctcctaccttgagtgcacctcacaccccactattggatgcctgggactctcacatgacacagcctggctgcttcaaaccccactgcaagagcaggcaaacacacatggaatctcccagtatgaaaacaaggatccagtttaaaaaacaaaaacactgctgggcacttaacatatgccaggcactgtcctaggtgttttgggtatgtttttctacgaatgccatgcaattacttatgaaagcgaggaaactagggttcagaggaagctggtaactcatcaaaagtcccacagtttgtaagaggtggagctggagtttgagccccggtctgaccccaagggatcctcccacctccttttaaccggggtagtctctgtgcaagtctaccatccaggtaatccctaacatttcattctcaggactgttctggcttggaggataaattattgggccttttaccccaagcccatcaccatgccacctccaacatttttccaaactgccacctgatttcacttggcttgatgccacaaaagctaagaagtttggatgacttctaaatttaataagaagatggaaaaagtaattcttataaatgtatcatgttctctctagagccaaaaatgccatgttatgaaaaggtttgcaggtggcacggaggggaaggggcaaagggtttcataaacaagggtgggggcttcagagtacgaattgctctagcgccccctctggtggcctctgagggtgcttcagagcagtcatgattcccagattggccacatatcaaaaccacctgcagagatttcttctcagatgaattttgagagaaagagagagagtgagctaggagaattggacctgtagatcaaaagacacagcaccaatctcattatgtgagccttatttagattacaattcaagcaaactgtaaaaaagaaaaagcatgacatttatgagacaattggaagtatgaccactgactggatatctgatgatacgaaagaattatttttaatattttttggtgtgatagtgataggtagtttttttttaacagtagcttttgaagatacctacagaaatacaaatgaaatgatggcatgccctaggatttttttctaaaatgatattgaaggaaaaagaataatgtgggtggacgtgtttgggtggggtacagatgaaagaatattggccatgagttgataattattgcagctggctgatgggtccatgtgacctaattatactattgtgtcttacttagatgtatttaaaattcctcataagaaaaaattaaataaaaaagttttaatcagatggggactctttaataacacaaattctcctcgcccaacccagtaactgcaaaatcagaatgtcctggatgcagccagtgattctgatgatcagcagggtttaagaactactgctctataaagttgtaaacaatttattaataaagagatgttatttaaggctcaagggcaatacacaaacaaatggttaatgggttgagctatagcattgtgagaaactggggtttttaacagaaagattgagtaactgaagatgattgttcattaatatcagttaatatttcctcagtgattctcttgaagagtagaggagtcggatcaggtgtgctttatggtcctgtcagactctgagatcctctggctaaccctgagaataggacaaaagaaagtggagctgtacttctgtatttaaaaaaaaaaaaaaaaaagagtatgacaagaagatgcttttattgtcccatgaattaaactttggaacagataataaagaaaagttaaaatgtcttcttggcagcatgttaaacacaggccaaaaccttactgcatagatctgtgagtcttattcgcttctgtttccttcatgcctaatatggaacctagaacatggtacatatttaatgtggctattgagtgctgtgacgttctcaagttagtttgcttcttaaggtgattcccttaagaaaatgattttttttctgggtttagtatgagagcagaaagaaggaaagtaatacagaagaggtacctaacaacgtgttagacagtatgtaaaggatttgctcatctacaccaagtttggttttgcaaagagaggtaccacttctaagcctcattgttgtttgatcatctcattggccccaaggattaggcatggccagtagagagaaacaccatataacccaacaagatactcatatattttaaacatcctctggatttattatagaaaaatattttattataaaagtttacagtttggggttttctctactagaactgtaaacagcctttgtattaaaatatttttatgtaaaatatatgctctccttcctaatttatggaaataggaaaattggtacattggaggctttaattaattaaattatcacatttctagaccaaagagatagggagacatagcaaaaagctggaggaatgaagtctcgttttattttttagattccagatgctttctgtaacagttgatcagggagctgtcaaatgcactgatgagaggtttcccaaagttaatttttctcataatacaataaccaaatttgctttaacacttgaaaaggcccatccatactaaaaagaatcagttgcttaatcctaaaattaaaggttattgcatgcaagagaaaataattacatgctcaaagtatggaaaaaagaaaactttttttaatatgtaggtatttgtataattaaagactaatcaagcatgaagggctgctgactaaaccagaaaatgaggttgttggcaagcaatattgtaatgtaaatgccatttttgtttaactactaagaagctggagaaatgatatcctgaacagattaaaagcaaacagcattgataataaatatttatcagatttcaaatgcaacacagagaatttttatattttacatgcaagatttgtttgcagtgaagtattcaggtacttttcaacagggtagttaacatccttatttagaattgcattttcagatagtatcttcctacggttaaggtacatgtgaaatattaaccaagggaaagtgctccttttgagatatactgcccacaatgcagttacctattaattatgattttgagaattaattagtactagttaacttggtgttaggcaaatactttccaatgaatatactgaatgtacttttagagggagagagacgagatacaagccatacacagttgttaaaacaaagaaaatagaaacgttaatgtaaaataaacgatttatctaaacttcaagcacatgatttaaagtagaaagagtagaaaccttgaagttacacataaacattctgaggctttctaccgctaccctgtaaaatatcacgtagggcactcgttttgttaccagaaaggggtccagatccagaccccaagagaggggttcttggatcttgtgcaggaaagaattcagggtaagtccatacaataaagtgaaagcaagtttattaagaaagtaaagaatgaaagaatggctacttccataggcagaggagccccgagggctgctggttgcccatttttatggttatttcttgatgatatgctaaacaaggggtggattatttatgcctccccttttagaccatatagagtaacttcctgacattgctatggcatttgtaaactctcatggtgctggtgagagtgtagcagtgaggacaaccagaggtcattctcatggcaatcttggttttggtgggttttggccggcttcttcactgcaacctgttttatcagcaaatgacctgtaccttgtgccaacctcctatctcatcctatgagttagaatgtctaaccatctaggaatgcagcccaggaggtcccaaccttattttactcaggaattcaacaggaaagaaagaacataccccaaacaggcaaaaggttttaatctaatgaagccctcactgtctatttgtaggtggtgatttccctgtattcaactgtgctcagccttgatttctcttataaatcaagattggctgcataaatgtagctgtgagctctgcaaagcggactccttgacccactgattaaagtatgaatgcattaatttaaagtagcttttaaaactcaggtattgtactcagcaagtatgctgtttttctcccaccacaaagcataattaaagataagttttcaggagaagaggcaaggctgtcatttttttaaccttcagaaacactagaagattcacttttcagtttctaaattagaatccgtcagtttgactgcctctgtttcttttggatgtaatgcctatgatatgtgatccagaaagctgaaagcatgcagacctactaaaatgcatttggggattttcagaaacagattattgagtgacaatatgatagccttcaggcttgctgctggaaattattatttaacttattttcctcctaatgtgttagtaacatgtacctattttctgaagactgccgaacacatcatcaaatgacagttcaaaaaacatttttaagtttattatttttctttttatgtaacatactttgagagccaggaaacaacattaaaagatgtgtttctctcaccatttctccttactcgtgctgtttgaagaggtcacaatgaaattgcaagttcttgagtctgaataaagaacacctacaaatgtttgagctcgggtgtttgagagagtccgaggttatttgcagaagtgagtgggttaggcaagggggaagaggctacagagagtgattctgtctcatggatgtagcatgtccctcacaagcggccagcagacagggcacccagccacataggacagtgccaggtcccctctggctgccattatctggtggtgatgtctgagagtatacagtggtattcagtttcctcagcctccaatgtcatggtagcccttgctatccccttgtttaaaactatgaagctgctctttcagtaaatctaaacaaaattataatctagtcttaaattgctcaaaaagcatctactaaaatacatcttgaagtttctagtctggaccaaaattcagatactgtgcatttaagcaatgcctttttatttcctcttgaaagctatcaatggccagaaaaaaaaaaaaaaaagtggggaggggaaatgcaattttttattctagcacatataaggagaattgagtagcccaaaaagaacctggagaatccccttgttaggaccctcccttctggtcaagcttgcttacagtacaagcaaggtcagaaggactcatggaatactaagatttacagaggattctatggcaaaatgacccagacctcatcctctagggaacttttttcagtttcctgataccattttagtaaacttctgatctacagttctggtatcattttagtcttatgagtcatttgttcatttatcaactgtgtgttaagcacttacagatgccaagcactattctaggagctagggcaggaatcaaacatgcatacaaatattaaaaaaaggcaaataaacaaacacatagtgtatcaaacactgataacttacatggggggaataataaatggggtcaaggtgaaagaaagtgctagagtagggggttactctttgatgtaggttaatcagagacgacatctctcctgggaccagcagaaagggcacactccagggaagggagcagatggaaagccctaagacaggaggatgtttgaaaggttccaggaagcacaagaaaggccagcaagaccggtacaaagtgggcaagggacagagaggcaggagatggggccacagaagaagcagaggccagatgacgctgggtcttgcaggccactgtaagaactgtagctagtactcggaataaaacacgaacacccgtagatgctataaagaggtcagactgccgagagtcaggagcgaacacaggaagtccaattaagagactactgcagcaatccagacaaagacaatcatggtttgtaccatgttgtacgtggtggagatggtgagaagtaatcagactctgaatatattttaaggaagagctgatagaatttgctgatggattggctttggagtgtaaggaaaacagaggagtcaaggatgtctgcaacgattttgacctaagcaactggtagtatgaagttccccattgatcgaggtaaggaagacagtgagaagagaaggtttgtgcacgttttgttcttaacatgttagttttagacacgtcatgtttgcaagatcactaaatgtttaacaggaaatgttgaggaagcaattggataatcaggttttggaaaaaggtccgtgctggagatataaacttgcaagttcatcagtgtactgctggtatgtaaagccagaggcctggataagattactttgagagcgagcctggatgaaacagaggttcaagtactggaccctggagcaccccaactttaaggatttctgaggaggaagagaaattggcctacgagattaagaagagggctcagtgagggaggaaaagggggctcctagaagaaaaagtaaatcaagtgtttcaaggagagaatgattaactgtgtcaaccagtttgggtaggtcaagtaaaaagaaatttgagaattaaccattggagttttcacctggaaataagtagtgaccttgacaagagcttcagtggagcgggagcgatgaattggagtgatcaaagtggattcaaaaagaaataaaagaagaattggagacatcaagaatagacaattcttttctggcatttttctctgaaaggaagccaacaaatggcataatagctagaggggaggttgggtcgagagaggtttgttttttaagatgaaaacagaaacttcctatttatatcttagcggtagagatcccgtagagggaggaaattgatgaaacaaatcagggatgttcttgaataggcaagaggcatggatgcactgaagcagtgggggttttctctagagagcagctcagcattgtcatccacaggaacggaacacagacatagttgctgcaggtgagtattgcagcaatgaaagggcatggaagttttcttctgatggattctctattctctttttttttttttttatttccataggttattggggaacaggtggtgtttggttacatgagtaaattctttagtggtgatttgtgagattttggtgctcccatcacctaagcagtatacactgcacccaatttgtggtcttttatccctcaccccttttccaccctttcctcctgagtccccacagtccattgtatcattcttatgcctatggatcctcatagcttagcttccacttatgagcgagaacataccatgtttgcttttccattcctgagttactttacttagaataatagcctccagtttcatccaggtcactgcaaatgccattaattctttcctttttatggctgagtagtattccatcatatatatataaccacagtttctttatccactcgttgattgacgggtatttggggtggttccacgtttatgcaatcacgaattgtgctaccataaacatgcgtgtgcaagtatcttttccgtgtaatgacttcttttcctctgggtagatacccagtagtgggactgctggatcaaatggtagttctacttttagttctttaaggaatctctacactgttttccatagtggttgtactggtttacattcctaccagcagtgtggaagtgttccctgttaaccacactcatgccaacatctattttttttcttattttttgattgtggccattcttgcaggagtaaggtggtatcacactgtggttttgatttgcatttccttgatcattaatgatgttaagcattttttcatatgtttgttggccatttgtatatcttcttttgagaattgtctattcatgcccttagcccaaatctggaggcatcacattacctgatttcaaactctactataaggccatcgttgccaaaacagcatggtactggtataaaaacaggcacatagaccaatggaactgaatagagaacttggaaataaacccaaatacttacttacagccaagtgatctttgataaagcaaacaaaaacataaagtggggaagggtcccctattcaacaaatggtgctgggataattggctagccacatgcaggagaatgaaactggatcctcatctctcaccttatgcaaaaatcaactcaagatggattaaggacttaaatctaagacctaaaactacaaaaattctagtagataacattgcaaaaacccttctagacttaggcaaggatttcatgaccaagaacccaaaagcaaatgcaataaaaacaaagataaatagctgggacttaattaaactaaagagcttttgcatggcaaaaggaacaatcatcagagtaaacagacaacccagagagtgggagaaaaatcttcacaatccatacatctgacaaaggactaatatccagaatctacgatgcactcaaacaaattagcaagaaaaaaacaatcccatcaaaaagtagattatctattctcaatggaataagaagccaggtcaatggctaagagtgagaatgagaaaggaggtgctagaggtctgaagagaagcaagaagatgtgaaacagtccttctaggtgtgtgggtaaaatgtcctaggattgctgggtggtgtcagggtgtgtctacttgaggttaatggttatgtatctgaagtcaggttgatcagcacagttataggtttttctccagccacattcagctgtgtaggtgcaggcacagagcaggtgcaaagttgaacaatgaaatgttaagctgggtaaagaaggaagaactctaggggatgggatgcttatggggcaatagaaaggtggtgggatttaagtgttataaattccagtggggttaaagaattgtttaaccagtaacaaactccagttgtttcaccattggagtttgaagtagtcacaggaatgagctggaaacaggcaggaaaggccagagagtggaatacttgtacctgagacaagggaaagggtgtggtcattgacaataccagagcatgaccttgggagatacggctgaggtagagcaaaggacatcctccctgaggagagaagggcaaagaactgggagaccacagtattggaaggagataaatatcacaaacacacacacacagatgcacacacactcttcccccagcagtcataattccacaaggcatgacagagagccaggagcaaaggcttcaaggaatgaggtggggtgacaaggactttaagggtaacaaagggtagcaagtggtatagtccctgggtatgagcttctaaactgtggtcttcaaggagatgggagaatggtctgagagcagcaacgaccagcaagcaagatcccctcctacccaggcccagagacactaggagcgggtagggaacagccaccacctatgaggtctttaggaaagcagcgtcctcgggacagccagacttctgctggggcaaaaaggtgtggggcatagtctgagaagatattgaggagttgggcaacttggctagtgaaggaccaggaattccagagagcccagagggaggtctcaggagttggggaggcaggggaggagatggagtgtgcagatgccatatgggaaaagatgtgcggatggagctgggattcttgggcttcttgaggtgaccagcacaaacagggatacaagatgtcagggcttacttccggtggcctccagggtagactgtggtgccagctttgagaaccagaggagagaggaggggtgagtttttcaggaatacaaaaagttttggggctcatctttacaaagatagagggggagacctgaagaggggcaatattttgagaatcacaagaaagctttggggtccttttcacccatggcaaacactattcaccacaagtcatttatccaaaaaaattgatgaattaatcttcattaatttaaccattaccagtaacagtagtttgggaattatttcctttcctcgtctcagtcaaaatattcatatatatttaaatttgaacctttaattttaaatttaaacgttcaaatatacaatgatcttgggaagccatttgtccgatagccaccacccatgctgtgaaaataaacacaattttaaaatctgtgaataaacatattttaaaagacacagaatggaagaatatcagaatagcacaggaaaaccttggctatccatcaccctcaaacaagtaagtttctcttgatagatgagttttcccagaagaggtaagggttaaaccttttagtactagcactataaaaggtgtaaaatgtaaatcttttaaaagcattttgcccccatcccctgccttcttaaacagagtatcatagtaataaaaatcttctatttgtatcttgcctgtggtttatatggtactgtcacaaacatgatctcatacaggcatacctcgttgtattgcactttgctttattgctctttgcaagtagggcagtttttacaaattgaaggtttgtggcaaccctgcatctagcatgtctatcggcaccatttatccaacagcacgtgctcactttgtgtctctgtgtcacattttggtaattcttacaatattacaagtttattcattattatgagatcttctatggtgatctgtgggcagtgatctttgatgttactattgtaattgttttggggtgctacgtatcatacccataaaaggtggcaaatttaatcgataaatgttgtgtgtattctgactgctccaccagtgaaccatttccctgtctctccccttctcttcaggcctctctattccctgaggcactacaatgttgaaattagaccaattaataaccctacaatgacctccaagtttaagtgaaaggaagagttgcatgtctctcactttttaaatcgaaagctagaaatgactaagtttggtgggaaaggcattcaaaaatcaagaaaggcagaaaactaggcctcttgtaccagttagccaagttgtgaatgcaaagaaaaagttcttgaaggaaattaaaagtaaagtgaagcagccttattgctgatatggataaagtttgagtggtctggatcgatcaaaccagccacaacactcccttatgccaaagcttaatccaaaccaaggccctctcttcaattgtatgaaggctgagagagatgaggaagctgcagaagaaaagttggaagctagcagaggttggtccatgagacttaaggaaagaagccatctccataatgtaaaagtcaaggcgaagcagcaagtgctgatgtagaagctgcagcaagtttttcagaaaatctagctaagatcattgatgaaggtggctacactaaacagattttcaatgtagatgaaacagctttctattggaagaagataccatctaaggctttcatagctagaaaattcaatgcctgacttcaagcttcaaaagacaggctgactctcctattaggggctaatgaagctgatgacttttaagttaaagccagtgctcatttaccattcctagggtaaaatcctagggcccttaagaatgatgctaaatcaactctacctgtgttttgtaaatgaaacaacaaagcctggatgacagctcatctggaatgaggtgaaaataacaacactaaggggagtttgaaagaagttgattccaaccttcatgaatgactttgtggggttcaagacttcagtgaaggaaggaactgaaggtggggtggaaatataatagcaagagaactagaattagaagtgaagcctaaagatgtgacagaatctcatgtgactgcaatctcatgagaaaattttaaaggatgaggagttgtttctcaaggataagtgaagaaagtggttccttgagatggaatctactcctggtgaactactgtgaacattgctgaagtgacaacaaaggatttagaatgctacataaactgctggttgctaagacagcagcagggtttgagagaagttctactgtgggtaaaattaaaaatttccacagccagcccaacctccagcaaccaccacctctgtcagtcagcagccatcaacatcgaggcaagaccctccatcagcaaaaagataaactcactgaaggctcagtgattgttagcttttttttttctttttctttctttttttttggagacagagtctggctctgttgcccaggctggagtgcaatggtgtgatctcggctcactgtaacctcgcctcctgggtttaaggaattctcccgcctcagcctcctgagtagctgggattacaggcacccacaaccatgcccagctaatttttttttgtatttttgtagagacagggtttcaccatgttggccgggctggtcttgaactcctgacctcaggggatctgccctccttggcctcccaaagtgctgggattacaagcatgagccaccatgcccagtcaattgttagcattttttaacaataaagtatttttttcagagatgtggtcttgctctgtcatccaggctgggatgcagtggtgtgatcatagttcactacagcctcgacctcccaggctcaagtgatcctcccacctcaacctcccaagtagctaggactacagacacacaccaccactcgcagcatttttttttttttttggtgggggtggttagaggcagggtctcactatgttgcccaggctggcgtcaaactcctgggctcaagcaatactcctgtctcagcatcccaaagtactgccaccgcacccagcctaaagtatttttatacattagacataatgctgttgaacacttcatagactgagtgtaaacataactttcatactcactagtaaaccaaaaaacatgtgacttgctttattgcaatattgactttattgtggtagtcgggaacctaacccataatatctccgaggtatgcctgcattatcctccaacaacctggtaaagtagacacttcacagatttgacagattgatgagatttcccagtgtaaatgaaaggaaacctaagtgcaacttcctgatgacttggggtcatttttactgatacagattattaggatgtttccagaaggcaagactaacgtgcaacataagagaacatagtaaaggataaacggtgtaggaagacagcagttgctctcaaagacccaaagaggagccaactgagaactgaaagtgtccaagaggacttccttgaggttgtggaacttgagcagggctctgaagctctagtataatttagaaggacaggaagagccagaggaagacattggtgcgtgtgctcctggatgtctgaatcagtagtagttattcaattggataatttctcttttgctgcaaatgggtaccactgctttggccaactatgccccctccccacctctgcctaaattaattcctgcaatggctaatttatgtgtcaacttgattgggccacgttgcccacatagctcaagtgttattctgggtgttttggataaaattaacatttaaattggtggactgtgagtaaagtagattgcctcatagaacagaagactgacctttcccaagcaaaagggaatcctgcagcagatgacctttgaacttgaacttcaacatgggctcttcctgggtctccaccctgtaggctcaacctgcagattttgaattgccagactccaaaatcttgtgagccaattccttaaaataaatacatctccttctcaatatgtaggtagacagacagacagagatatctcctattagttctgcttctctggagaaccctaactagtaccatccctttctcatagattatatgaatttccagaaagatgaaaggaatacagttctcctctgcagggcatagacctgtgcagtggtggaaggaagaatacttatctttacagtcaatggaatcaaggctgtctatgtgttttcagggaaaaagaagccagactcggagaatggttttttttttttttgagacaagagtctcgctttgtcacccaggctggagtgcagtggcacgatcttggctcactgcaacctccgcctcccgggttcaagcgattctcctgcctcagcttcttgagtagctgggactacaggcgcccaccaccacacccagctaatttttttgtatttttagtagagacaggtttcaccatgttggtcaggctggtctcgaactcttgacctcatgatctgcccaccttggcctcccaaagtgctgggattacaggtgtgagccaccacgcccggccgagaatggttcttaaagttcagtctgggggctcggagcactaacggccagtcctctctcctcctccctccatcctttacccctgactgctctaacagtcactggctattgatcaagtccactggctattctgtcacttctacagatgtccccttgagccagctttgtggctttccccaataccacccaagaggagtcatgctggacacactgtggttaccctctgtcatttgactccactgatgattctgcccaacacccactcaaggtagacaattagttaatcaaagtaattaactagtttacgttcaaccacgggctcattgctatagcgcaggagccagcagacatattatgtaaaggaccagattgtatgtatcttaggctttgcaagttaaggatattctttttgtttgcctgtttgttttttgtgtgtgttttgttttcttctttttcaagacaggatcttgctctgtcacccaggctggagtgcagtgatgcaatcatggctcacttcagcctccaaattctgggctcaagcaatcctcctgcttcagcctccctcccaagtagctaggactataggcacgcactaccatgcctgctaattttttaaaattttttgtaggaatggggtatccctatgttgcccaaccttgtctcaatctcctggtctgaagcagtcctctggctttagcctcccaaagtgctagaattacaggcttgagccactgcacctggccaaggatattctttatgtacttatataaagagagaaaacaaatttccacaaaatttttattgatgaaactcataataataggaattgagtagaatttttataatacagatttactaatgagaagaatggaattcttttgggggacatgtattagtcagtgttctccagagaaaaaggatcaatagaatatatctatctatacaattccttataatggaggctctcaagtccaaaatctgcagagctgatataccagatagagtctgaaggtgagcaggcagaagaattctctctggctagggggaaggtcagtcttttgttctgcacaagccttcaactgattggatgaggcccacccacatactgaagagtaatcagctttattcagtctaccaacttaaatgttcacctcatccaagcatggaaacacccagaataatatttgatcacacatctaagcaccctgtggccctgtcaagttgacacataaaattaacgatcaccaggggataatgtatcacatcattagagtacaaacttagtgcttctcattatcaaatcaattgtaaatgttcatcgataaaaatcattcttagcttatgggccataccaaaacaggctatgggccagattcggcccatgagcagtagtttgcttacccttgctactgagtaatagtaaggataataataataataataatgccccctaaaaataaagatatttaaaaaattaaaatataataagaggcaagatgtatagttaggagagcagactgaagcctgactgcttgggtttgaattctgactctcatttagtagctgtgtgatcttaggcaagttgcttagcccttttatgccttcatttccttcttttaaaaatgcagattaaagtgtcagcgtcatagatttgctatcaatcaggattaaattagtatttgtaaagttcttagaacaatgcctgacgcatagtgagtgctatataagtactagatatgaccatagtagcagtgacgttgatgacagaaggtgaaggaagagaggggtacaaagaagatgggagataagttctgataatgttgggacgctgagcggtttccacagattgtaagtgctagaagatcgactgattgacctacgaggctgaccaatgctatgagcaactcaaatatgataattagtatgccaagagccaacagtcatgttcctgttctgtagcccagcaatcaaaatcataaatgtttcttttgctctgaagatcctgcacccaaggaggagtatggactaagggagaaaggtggatggaagaatttggtacttcacttcagaaatgattcagaaccaagcacacagaaagtggagaactgcctacctagtctagctaactgtatgcatttactggagaagcaataattttacaaagaggctgggaactggtctccttattgaataaagaataagctcccagatttacattcattgattttctacccagttgctatctatgttcatcatgttgaatttcttctcagtatccaaaaatcaaggtgttgagagagcaaaggtatctgtatctgtgtcctctataatgcccatactctttgtaaatataggcaacttttcatagatcttaactcttaattatattcattccaaaaagaagttttttttcaaagaaataatggattttgaaaaataaaaagatctggccttattgctttgataaagatttgccacctgtgaccctttaaatattgaacttggactataaaaatatcacttcttattgatcacatggttattaaagtcagtcaaatgctgaacttatatgtcaaacacttgtaatatttcctgtaaatattggggcaaagggagatgatgataatgccactgtgaaaagtcgcattagatttgttcaactttacgtcactgagaaataatacagctgtcatcaagaatttcattatacatgccaagcacttgtcaaaaactgctgcacatcatttatgcatgtatatgtgtctgtgtatgagcccagagaacgtacacaagcttgtggcatggaggagaatggaataaaaagcaatctgtgtacctaaccacctgcactggacctgtacagtatagcttctgacagcagctaggattatgtgggcagcccctgcacacaaacacatttgggttcgccttttcttgaactccaatctaccgtgagatactgacagctttctgggtctggaggaaagcctgggaactcaagtcaacaaattctaattacaggtttaaggcagattcttaaagccccccagattcttaaaatccccatctaaagatattcaagaatgcttttagggagaagtcagcatagagatccagagatttctagtttccccacaagacacctttccatataagcaaatgttttcaaatgagtagcagaaaggaaccgtcagtcaaccacgggggagtcttcaccaggactcttggattgagtggaggagtggggaggcatttctaatggcattttgatgtacatgcacaaaattgatgtcggaaggatcattgtaaagtcccaaacagcggaatattgaggacattttcaggtggcagtcagattctggctgggtgaacccagtatattttctcatgtcacagttgattaggttcacagggaagtggaaagagtaaaaaattctcttattactgcagcaatgccgtctcagcctcttttccctttgaatgcaacattagtttttgtccagaagtctaactgctttctacagtttggggaattgtaaagcagaaacaattttcccagccaggctgaccttcacagtaatgagaaatgactggaatttctctctatttctctaacatttggggaggttttgggagggggctggcgggaagatgaaggaatatgcttgttttacctgatattatgttgtgggcatccatttggcactttgagcctaatttttttccattcaggggattacatggactgttgcaccatatgacccgggagcgagaccacaagtgtattgagaaacgacagtaatgcactttaaaccttttgttatcacaacagagatggcattttgtttcagccattaaatgaataaatatttttctcctagggatggctattttcatttactctccagctcttattcaggtgatgaccagtgggactgggaaattccaccttcattcaggtcatgccgcccagtccctgaagccgtgggagtcctcccagccccccaaccttccacggaggcacccccagagccagccatgcagtcctcttttgcggtcccttcttcctggcttactgctcaccactcacctttccctttgctgggacacagggactcgatggccaagaccaatgcttcctccttgattttttttttttcaaatatttaagattcctatttaaagctgcagcagtgtggaaactcctgggaggggaggcagaagataaactttaacacagtccccacaggagaagcagttagccctaaaggagacatttagccccaagagacatacccagagctgtcctgtgactaagtgttcaggttggcagtcaatagcaggagatgctttggcagaaagagcaatttgggggtggagttttttgttgttgttgttgtttctctctgctcccaaaccccatccctgcccctttcaagtaggcagtaggggatcatgactatattgaattcaaatcccactctgccattcactagctgggtgaccttgggcaagctacttaaattctcaaaacctcagtttcctcatctataaaatggggctataatagtacctatttcactaacctttttttatttgaaggaaaaaaatcccacttagcacaatgctgttgggtgctttcaataattgtcctcaacaatctgtagcttatattattgacttgattctgttcattttcaatgtattgcaaattggtgattaatttgccttatagggtcatataagactccacagtttatccattcactgatctatactatagaatagcgctgttggatgctcacttaaggacagcaaaggagatttgtggcttgagactgaaactttatttttttctggtctgctaaaattaagtatgaaaataaactgtgttggaggagtgagtagtcaggaggggtattcataggaggagaagcaaaggagaggagcactgaggctaggaattgtggagaataaggtctccagaagggaatcttagtgctggctccatcaccaactcagtgctgtgcttggtgctgaaaaagactcggtccagtctggaactgacacctggataacattctcatgctctctcatttcacagataaggaaagtaagacccagagtatttgagaaacatacctaaggccacatatgcccagtaagtagatgatctccagggactcctacaactgtaaatttattatctacttgaatatcatttgctattaaaatagtggcaatcacaacactggaaaagcctccagttcctagaatagatgtcaaactcaaaatgatactttaaatatatgagtatctgtgatggacatagctttgttgtttatttttagaattatttttgctctattttaatattactttagtatattttaatattagtgtagtttaatatttattcagtatttttatacttatatatttaatatttatttagtatattttaagtgcatatttacatatttcattataaaaatatattttacttatgtcgatcatataaatatatttgtttaactatatattaaatatataaagtgaattaaaatcaattgtttaatttatataattatatttaaattaggtattaaataacttaaatattaaataacttaaatattaaatatatttataattatatatatatttttttgagatggagtctcattctgtcacccagtctggagtgcagtggtgtgatctcggctcactgcagcctccgcctcccgggttcaagcgattctcctgcctcagcctcccaagtggctgggattacaggtgcacaccaccacacctggctaacttttgtagttttagtcgagacagagttttgccatgttggccaggctggtcttgaactcctgacctcaggtgatccacccacctcagcctcccaaagtgccgggattacaggcatgagccaccatgcacggcctataattatattttaattacatataaaagaaatcatttccttagtaaatgaaaatgtttgccatacttaagagaatgattcaaaggttgtcttcctgggcccacatctccaagatttgccaaagcatataggcgttgacagctttacaggaagaacttccagagcttcatttagtgttcacatgtcagtaactagctccctgctcccccctcgctgtgtcaaccttggggcagaagaatttaaatatacttgttttgccatgtgtgttccaagatggctttaagacctgaaacatgtaggtttaaccccagaaattcccccaaagaactaggagtagactagggagggggaacttgcagaaaggtaaagagttgtaaaaaagcaagtgaagatacaaaaaccatattcactttaaaaattagttacttttaaaaataacctgcataagagccacaaaaggtaggtacctctaagaagagctggttcaggagaggaacttttccttctcctcaaacttttccttctccctcttgcttggagtcaaatctcttgactaagtttctgccagcaatctgcccctcaaggtatctgcatccctcagaatattttgtgccactaattggtccaatgatataagtgggagtacatagcccatctcttgacccaggttttgatggcatctgaagagtgacttactgaccactaccttggaagacaatccatctcttataatgatgagaatatatttcaagagaccatctccatcccaggaacatccttgagcaaaaagagtagtttacgggtgcagtcatgttctctttctcgaatttattcccttctctctgtccccactgccaccatcctgggctaccctgcagatgtcatagctcttgaggctccagcactgacctccttcccatccttccttatccatgctcccctgaatcccctccaatcccgtctacagactaagtcaaccttcctgaaactttggtgaaacatgttggtttcatgatgtggcatattggtggcatgatgtggcatgaggtggtatgatggagcatagtgtggaatggaagagcgtgaaccaagagtcagaagacagagtttaagcaagtcctgactctgcctcaaagtctatgctccgtcaatctgttgctgtcactgattgctagtttctgcttctgaaaaatgagcccatttacagatcttctgaaaaaccccttctttctccaacattgtaatatttatccaaggctacattggttatcatccttgcaacttgggttcaaaaagtggcagaaactcttcagattccaggaacaccaatgtgaaatccttattaaattgtttctgatcatgtgaaaggtgaaatcagccattcttggcaattcatgtgcatatagaagtgtctgatgttcatattataacagaattatgtagttctttaagctctcttgatgctcacgttataactgaattatgtagttgtttgagattttcccttgtggggaagattgattaaacatgaaagatgctagaggtggatcaagaatgaccttgcaatagtccaaggtctagtggaaaagaggaggacaagcagatggatcctcaaagtcaaaatggtaagataagtcattgatgggacctagaagtgaagagaggagccaggcctgaatgactcaggaatcgggtaggagggctctgggggaaagaaattgagtccgttttgaacaagctgagttttaggtgctgcgcatcattctcgtggaaatacacaacagacctttgggatttgtctggaggttaggcccaagttggagctagaaccacagattttggcatagaatcatatgcattaaaatctcttctggtggaaagatattttactatattactcttcctccagcaatcaatccgctgtaaatcaatagtgctttacagtcactattacattttgaaagtccatgtactcagctagccacttccccttctgtcttcaaaccacctcccctgctcttcaccctgcacccacctgcctgcagaatcatttcacctcccttcctcaagctccaatcctcctaactcaaatgttaagggacaggcacaaattatttctttttcctgttttgcatgactcattactaaatgccctttaggtaaaattccacccagttttgtgatcctgcagtagagccagacagtctacaagctccgctattttccacgatgattactatcgttctccttttttcttttaaaaaaaaattttaaacacaaatccagggctggtttctcctcatcgttttcccatcctgccttgccctcctatcaccaacaccaactcccctggttttcagagagaactgttcgcttgggccagagtgtgagaggatattccttctcaaaatgaaagccctcgtcattttgaggtaaaatgcctttctagacagagctgtatgactttctgaaagagggcatttatagaacctcaaatagatgaatcgttttctttcaagcagggaaatgtattttactcttcttgcttcaactgggattgagcccattcatttcattttttatgctctcctgttttatttagaaatgatctattcatcccaacccaattgaagaaatatagataactcaggaaaaaattgccatattattcacatgagaaatatagatgctcccactgaatattttcatggctccatttaatttgagctgtataaacctggcctaaaaaattctcttttatttgttatactctaagaaggcagtgtcatccctggagtgagtgagacccagattctaattgcagctactcccaggcctcttggacaaggcatttaacctcagttttttcacctgagaatgggaataatagaatctatttttcaatgtgttgtgggattaagtgcagtaatttgtgttgggtatctggcacatactgtgttacatggtaaatattattacatgtataaaaatcatcctttgcaggaatctttttgcatctccaataatgttgatgtaggccactctgctagcctagcagaaggatgctctgaaaactccttattttcagattagcactgcttctattacaaattacaggaggtttttaaactgtaacaaaataaggacaacatcagtgtgagaatactatattctagcaaaaaaagtcacctcattataaattgaaatgtcttttacctattttgtattattatattagcacatatccatttctatgataaatatctgtacggaggcaaagtatgaaaagctgccgaagtgctgctcctgccttttggctcctagaagtcttcccttcttggttctcttcacagtgatatttagtaatgacttcgctgagacaagtttcccgacagatccccaagtcctgcttcctcgtgtcgtgtgcaccagaaattctactcgtgctcacccactagtttctccagtgggcccaggtagaagcactgtgtggcattcaggagacaggtggactcaaagtccttagattatctcatcccctaaaaaaggagaaaactgtggggcagcccacagcatggagtgacaggaaaattgtgatcaaacatccagccttctcagccttttttgttttttgtttttgtttttgagacagagtctcactcactctgtcccccaggctgcagtgcagtggtgcgatcttagcccactacaacctctgccccgccccgggttccagtgattctcctgcctcagccacctgagtagctgggattacaggtgtgagccatcatgcccagctaatttttgtttctgtttttgtttttcaagatggagtctcactctgttgccccagctggagcgcagtagcacgatcttggctcactgcaacctctgcctcccgggttcaagctattcttgtgcttcagcttcttgagtagctgggactacaggcacgcgccaccacacccagctaattttttgtattttttttagtagagatggggtttcaccacgttgcccaggctggtgtcaaacacctgacctcaaatgatctgcccacctcggcctcccaaagtgctaggattgcaggcatgagcctccatgcccagcttcatttctttccatttttaaaaacttctttttccaccccaggcacaaggcatttcaccttgggtcacatttcaccaacccatccaaagcaactttcaagagaaccccaatgaagtcttttgctatgagttgcaaaagactgatttgtacatataggtgtttctcaacctaaggatatttgcatgattgcaggggacaatgcccatgttccaatttaagcagaaaaatgacctaattatgaaatggattcctataatcagttgattagattcctggtttccacttactgacccagtttctgtctgtagtaaagttatacaagctcttctggaacctatttatatctttaacaaatcccttgagctaatagctatgtaatttcatgacaaagtgtaagaaaaaacatttttttcacccacaactagggtaacaactcccctgttagaaattcctctgtccagcaacttagctctttgtagcagttgagaatcaacacacaagcaaataataataataataataataatataaaaatggttcaatctttgtcaaaatgtcatgtacattatttaaaggagagaaatcacttaagttctgacccagatccaaccagattggttatctggctgcaaaagcatggaagattataattaacaagtaacaagagaaaaaggtgcttttcgaagcagacccaaggacacctgagaccctgcctatcagaatgggaagatacagaacagaaacatacaacagagagacagaacagaggttcagagagacagaacctctaggcctgggagcttgaagcaaagggtggaggtcatccaatagaaagagagcaccagcacagagactcagacctgggccagcaggatgggggaagacctagaggaaccgaggcaggcgagtggaccagggtgaggcaggcaactggaatagaccccaccccagccacggatctcagggaaaagagacagagtgctggacccaggaattcatgtggtgggcccactggccctggtatgcaggatgaggcaagcctttaggatagagctggctgtcttgggaggttggaagattaaaggttggaggaggctgtcagactggaaggaattgtagcttgcaggttttcagggaaagaactcaagcaagagcaaatgtgatcataacccagtttgaagaggctggttgccacctagagccttagaatagggcactaagtcagaaaagcttgaatgtactgtttatctgacgggcaaagctcctcaggtggagatcctcaaacaccccagaaacaggactgggggcagagagccaggcaggtcacactatgactaattgatcttcataataataccctggagtcatcaagaaaatgaggaatttcattaagtataggaaggcacaaaaaattattggtgtggaaaggtaatgaataatatatcatgtagtttttaaaaagtgaatttaaaaattacctttccgcaaaaagtacttatactgtgctcctattgttattaatatgcgcattgccaaggagaactgcaagaggacaggtaccaaaatattagcattgtaatctctgggattgatgtggttttaatttaagttttatttgcttgtctttacaattttctacaacaaatttgtactttgtgtgtaacaaacgtaatacatgttaaaagaaggaaatgtagttggcaatgcattttgtaatatttccatgcacaagattaaaattgtttttaaagcctctcagccattcaaaaatcctggtgatctgatgtgattcatgcctctaggaaccccaaacagctattttttttgtctatgacataagaacctcagtctgaatcaccactaacagaaactttctatgttcctattttctgcaatattttagtttattcttataaggaaaatgttaaatttcctttattcaggagatctaagacccccaattagatcaatccagtggtgtaaactcttcagcatgaagagctacatctttgacctcttttgtctccaccaacagagtattaaaatcagcactgagttcatatcactcagagatgcttaaccattgaccaaaacccaaaaagactgcatgaaggtgtccacaatcacacaacaaaccagtcatgtgatgcagtgctagagtgctcggggtgtgcttagagtgctcgaaccagacctctgaagatgaattaccatttctctctgtgaaagctacagccattaccaaacctactgagaaagtacatcttttccaaagtcaggagtttctacacctataagatctgggcagcttctctgagcttctgttttttcatctctcaattgcctatctctcagcattgctgttacattagatctcatggaaatgcttctttaattctgcaagggcagaatgatttaactgtatcatcttctccccagaacgtttaatttgaatgtgataaatggcaacccagataggggtctcaaaatatgtggtaaacaaatcattgaaatgtaaggaactcaaagatatttgatcctgaagctgattcaataatccaaagcactgcccagttagaggtcaaggaggggaggataaatccaaaccagccccagtggttctcatttgttccactaaagtctggagaaaggaattttattggtcgtggctcataaaataatagatactctgtcctgagaaatacttgcaattggtttggatcaaatgctcctgggcatggaccagacaacatggctgggctgtttcctttttgtaatagcggtgacagatgaccgttaaaaactatataaagtttttaaaagttttaacaaaatgcactgcaactcaaagcacgctcttatcaatgatcatgtctgaagactatagaaatgtagggcaacaaatgagttaagaactaaagagttagttggaatctgcagttcttttgtgtttctttttaaccaaagtaaacaaatttgccacatgtatttgctataaattaaaataatgaatatgcaaaaaatgacaaaaaaaaagccctgcttgtttctgcctcagggcctttgcacttgctgctccctctcagcactgttctgcacccagatatttccatggctggcttcctctcatttctaaactctcaccttctcagagagatctctcctgaccacacaattgaaagtatcttttctctcttccgcagttagtccttttctttctagcacttcccactacctaatattgccttgtctgtggtttatccatttgctatttgtctctcccgcagctcctcatacacacagaatggaagcaaaattattgagttaagttgattcagaacacatttggaagctttgtgtcctctaaataaatcctcataagtagagggataaattttgatcaaataataatatccaaatgtttttgaagccaggatttagaaaatgttgttttttgtatatatgtgatttataacctgcctgcacccaaaagggatctgagagaacttataatcaaaaacatataatactcataagcagagccagtaatacaaacaccaaaatccatgcagagtgacaagaaaataagataccaaatagctaggcttatatcatttctataattgctaattaaatttaaccctgagcttcctgagggttaagttagaaaatgagacacagtaagttctgcaaatctcaaatctttgcaatggaaagagtatctgtgtgtcacgaatgactgctttttccctcttgtgtttttattcattcaacaaacacccattgcttgcctaacaaggcattgcgttcagcaccaggggcagagggaggaagtaaagatgaataagacatggtctctgctcctgagttgcacacggtcctgggaaaccatcaccagtgagagagaagtatgctagtcagaggcttggaggtgtgaaagaacatgttgggttctaggagctgccaagttgctcagagtggtcagagcattaagaacccaataatcacccttgtgcgacctgctgtgtgcctgagcattgaacttcataccgatgtcccaaggtaaatgctttttatcactccccattgagactggaggaacttgaggcttagagaggcttggtatggggatgccgtagtgccccaggtccctcttcaatggagaagtgttgctccagctgtccgggagtgctcttggctcacagccacctgctgtcagcagcccctctcagagggtctcagctgcagagtcttctcatccagagctttgcccaaggccatgcccctttctagggtggcctacatccaatgacctactcacagggagctttaaagaaccaacttagggcagatcacaaggtcaggagatcgagaccatcctggttaacacagtgaaacctcatctctactaaaaaaaaatacaaataattagccaggtgtggtggcgggcgcctatagtcccagctactcgagaggctgaggcaggagaatggtgtgaacctgggaggcagagcttgcagtgagctgagatcgcaccactgcactccagcctgggcaacagagcaagactccgtctcaaaaaaaaaaaaaaaaaagaaccaacttaggccacttttacagaccattctggctccaaagcttccccgtggggctgccagagatgccaggcctgcaccatagcttgatttctctctgctcactccagctgccacctgctctcttcttcaggggtcaatcccaaggtccctcctccattaacatcctacacactaaactcacagagtctgcttctgggtaaacacacctggaactctatctaggtgacagggtggcagagcctcctttagaacccagacaatatgactccagagctccaccgttctattatagctccctcacacttggtgcagagtgcagatgaggttagaattgtacatttggggcagtcacagtgagatgagagatgagttgctcctctgaggacaagggagaaccagcaaagatttttaacaggagggtgatctcagcaaatgtttcaggatggctgctctggcaacagcacagggactggactatgatgggaaaggtcaccttatctctataatattaggccatgttgagctagagtcccactttattttatttataattccttctttaattttctgaaaataatgcaaaaaaagagcaagaagaagttggatcaaatagcagtggcacacaattattagcacacttatcctgtgtataaatccctagataggtggttgccttccagtctgtcttcaacgcacacacaaaaacatctttaaatacacagccggcaagccagttaggagatgatggtaatagtcaatgtcgtgctcccctctgcagcgcccccttgcattgggctcatgacatcaaccctgaaagtggggcagaaacagtctaagctggaacagcaactgctcagagaagttgtatctcagctggaaacactagctgcccagggccattgcagcaggggaccctgtggtaggttgaactgccatgcagcaccccgtgctgggggacaggaagacagtggacccaacccgctcatccccaggaacccagggtcacccactggatggttctgcttgtctctccacagtggttgtctccatgacaagacacacacaatccttattttatattccatcgtgccatctttgaaatagacacatatggacacgcatgaacacacatggccctgttccaaatccccacctaccagtactaagaaccatttcatagttttcccctcctaagagttttttgtctaatacgtgtgcatcctttccattgcagtccctgccattcagacttcttcttttacagaccacaatggcagaacccaggaaaacctgacatttgtttcacagtttacgtagctgattgaatgtactctctacagttccattacgtctctaacaaatacactagtttttccctttagagaataggggattatattggaatgtcaggatcaagttagtacgtcaggtgcgcattccatccacatgaacctccacaattcggtggctcctggctccacacagcagaactgatataatcatccacatacagttattcagctttgtccatttggatacaggacaatttctgccaaaaacagttgttttcatttgctacagatgctctcgagctgctgtcttgatagtcatggaacattatgctttaatcaatcattgatggagtccattggctgtcaggactgagcctcaggtaaagtcacagaatgaatctaagatccagccatggcctcgaaaagtgcacatctaacatgttcatgtgattcctgaggccgctcctagttcatggagggaaagccagacctcctgcctcgagcagtcatccaatccatcaacaaggccacttcatatcctttaattgtaaaataaaaataaagggacaccagcatcagttatttctaggaaattataaatcctcaggttatgacctttcaaagaaggagcagagtaaatgtttttcaatctttataaaaagagaatggagaggttttttggtgaaagcagaattgaccatgtatctgttttcatggcccagtgtttcactgtcctgcgacagtgctcacatggaaaacttcaccatcacaggaacagagaagggaacttcagtaggcgtcatcacagtccccatcaatcaaaatcacctccttgcttccattgtttgaatgtcctgttgatatccttgtttgattatcaaaatgattttctttcttttttttgagtcagagtctcactctgttgtccaggctggagtgcaatgacacaatctcagctcactgcaacctttgcctcctggattcaagtgattctcctgcctcagcctcccaagtagctgagactacaggctcccgccaccactcccagctgatttttgtaattttagtagagacagggtttcaccacgttggccaggctggtctcgaactcctgacctcaggcgatccacccacctcggcctcccaaagtgctgggattacaggcatgagccactgcacctggcccaaaatgattttcaaacaaagaaaagttggctgtggaatgattctcataatggtgaattgaacttcctgggcttagtcttctgagaaaaacaaaaatcaaaaagagagagaaaagtctttattttgctgtcaagtgcgtctatctattctggtaaattaacggctagtacataaactctatttcatatttgaaaccatttctacttgagataacctattttttaatgtattgcatgattactattcgaatactaggtgacaaagttcatgagaaagaaacacattaaaaatgtttagaaaaatataggattgtttcaaaaagtttttgaaatggaatgcaattttttctacatttcttgggcttatttaccataattttattgttttattttgatatctgtacacttcagtttactggctcctcctcaagaagatgtttgtcacagagaaatatatctgtattggtcatagtgttactagcaatggccataagaaacacaagtagtgtcattcattttcagaaatatacagcaagcccccgtgccattttacttttctaaacacatcagtgaaaatttaggggaaagagtgtagcaacatgactatatcatgtcttgaataaatgtatttccaagaacaatagttctacatgttttagttttattctgacatgcttcaaaacaatcttgtcactgatgaattctaaaatatcaaaatgatttattttagagccaggcttttaactgtaatattttattataatttataatgactatactttggttatatccaaagtttctcagaaactggatataaacttcttcagttctgaaaaactttggatataaccagaccaacagttgtgagtaacttgccttgattgcagttgtgaaggatagcaattgatctgtaggtgcaaatcaatctctccaccaatatttctaaggttaaaaaagaagctgtggttacagaagctaaggaaaatagaggaccaaatgtaaatttgctccttcatacaaaaatattttttcctaactgtaatatccaatacatataaaaatttgtgtttcttggttttatttaatgttgaggtttcaaaaacaaaatgagattcttagtggccatttttcccctgtgtttaacaattatattaaggcacaaatgaatagaaaataatgaaaagtattactcccaagccagaattgggcaagtcagccacagatccagttcaaaccctatgacttttaaaatagacacatatggccacaaatgaacacagatggccctactccaaatccccacctactgctgagaaccactttatagtttttccctcttaagagttttttgtttaatacatgtgcttcctttccattgcattccattccattcagacctcttctttttttggaatgtaaaagatgctacatcaggtaggtagtgatagtgaggacaccatcagatacgatcatgctcacttagtgatatttcaattaatagctgggtgcagtggctcactcctggaatcccagcactttgggaggctgaggcaggtggatcacttgaagtcaggagttcgagaccagcctggaaaacgtgatgaaaccccatctctactaaaaataccaaaattagctgggcatggtggtgtgtgcccatagtcccagctacttgggaggctgaggcagaagattcgcttgaaagggggaggtggaggctgcagtgagctgagatagtgccactgcactccagcctgggcggcaaatcaaggctctgataattctgacaaagcagaaatatcactgtgatggtcgcttaatggtaaggcaaggcagatgtgtttgtgaattcttaaagctcatgcatctccatgattcttgttaaatcaataaatcttaaccaatttgcatgaacattaacaaaagcaccaaaaggaatgttttccagacctagatggtttgagaagcatctaggtttggaagatagagtccttcctttagctgtagttgatgagaaaagccaaggtggattacaaatttcttccattagtgcattcgttaaatcggcggataacaaagtaatacatgacccagcttttcccagagtgtataacatagaatataagttctaagggatgttagtggcgttacatgagaagtgggtactatcatcaaataatgttgggcaacgcagagttaaacaagctgaacagggttttcttgttttttgttttttggtttttttttttacctgtggacaactttcagaaccatcagtgtcctgacatgcattataaatcaccaagaggtagatgcttcatgcagtgttccccaaacctgtttcattcccaaacctttcattccgagcaaaccctgggactagggtcccacaaaacacaccttgaggattgctgtaattgtcaagtattctaccaaaatatcattgcttgctaacatgtatagccactagctaaaaaatacattattcttaaaacattatgaacttccattttattttggtaaattcttgaaaaatcacattttcttcttgttacttgatggctttttttcttgaaacctctgatgactatcttggtcaatttgtccaagttcttaaagccaaaatcttagaaaagtaaacatgtttatatgttgtggtttttacttcattttctatttcaatattttattttaatatttcctatataataattatatgatcacctcctaaacttgcttattttcttttcctccttttttttacactgagccatttgctttatttttcctttaagtatggcaattgagaagtatagaggcataatgaataataagatgtgctctcatttttgaaaatataatgtacaaaataagaactcagtagtgtacatgttattctgaaaaaaatcaaagtatgagtaaaactttctaccatccaggcacaagaatatatcccctcaaaacctaaattattcccaagtttcataccaaagttatcctgatgaaaatccccagcagctgtgtctctgtcaacagagatggcaaccctctcttgcaaagcgacaaccaaccctttctcttcctcccttctgcagtactgtccttcagtacacaggcaaaactgctatgccagttctaagtctttgctataaccttgaaagcctttgtctggtcgacttgcagttacttatcttttaacattaggtaactagttgttatttaaaatctattatagatttaaagttccattgttttccctaggatagaacattgtgatagctctgatcatgttggaaaggccactagtcccattcccagcccagaggtgttcacgtgcctcttgttgctgcctgtgggctgctggaagccaacctagaagtcaatgaacagcccagttgttttagaaacttgctaaagccttgactcactaaatatttatttttagccatatgttcctacttgctgaaacagacttagaaaattctatttagttaatacatttatttagtaatccctctaggagcaggactcaaaaaatatagcactgttccaaattttattccattttagcatatcgtagacttttatcatttgaagaaccttaaaaaattatctgattcagggcttctcagactttagcatgaattagcatcacctaaagagttattaaaacccagattgctgctccagcccccagagtttctgagtcagcaggtctagggtagatgctgagaatttgcatttttaacagttcacaggtgaagctgatgtgattcattccaggaccacactcagtgccactgtgggagaaagccctttcttccaggtctgcttcagagaagctgagcgttcttggaactagccttagacccaacaccccacagaactctggaaggagggagcaaatctggctttctcccatccttggagcaacacaagggatgattgatgggtggacctcagtgtgtatcagaggttttcgtcagggaagggtaactctgtaacacacatccctaaaactgctgtggcttctttgctgtctgggactacattttgagaaccacggatgtagttcaaccttctcaatttacggacaggaacatggaggctcaggcgaggcaggacggcatgaccagggagctgctgatgcaggaagacagcccaggtgcccagactttgagcaattttacattctctcctgcactaccagttacctagtttctgctcataagtgcacagccaaacatttctcaatagtcacaggattgccaaagcattttttaaaatatttttctctttgctgattggggagatgggtttcttccatcagtgattccctgctctcttcttcctaaatgtagaaaattcccacacagccttgcttttgctcttggtgagattaagctttatgtttttaaacctatgttcggttttattaatggaaacttcccaaacaatctatacaacaatacaaaaactttttatattttcttggcttacggcttctacaggtagtggttcttactgttagcttaatgtgtttagaacaaactataaccaatatattttgtgagcagagaaggattttatttccctctgagcattctagtcatgttttctgctttccgtttcatgtacttatcttcccacttctacacagtcgtattttctctaataatttagaccatttgtttttcctaacgacatagttctcttttgggcacttaatgctgcagcacctctggcacgggtgtggcagatactcctggaatgttcagctgcttttcgaatcatctgccaaaaggaccccctgggctctttacaatgaagaaaccttcatggatgtgaacccagggctgcttacagacacccacttaagatgggtgtgacatgaccagaaatggcattttcttctccctatagttaaaatgatatatctgacccttattgtgaattcaagagggtagatgttctaaggttcagcggcagaccaacaacaaatggcttcatttctactggtcccctaaaaatatatatcgtatggcccaaatgtagtattttttgtgggatggctagcatatctctggctagcttccttctacaacagctgttcagtggatacattttatgaggcaagcaagccattatacataataataaaattcagtaacagcttaacaaggctctccatttgcccatggactgataaaacaaagatattatgcataacatttgttacaagcatattttaataaccaatgtggttattgggatggaaggaagaggaggcatatgctttgttccttataagtaattaattgaattagctggacttaagaaaagtttcttgggtttcagtggtacaaatagaatctgtagaaaagacacaatattctggagtaaaatacatcagaatgctccagtacttagtccccaaataaataaaagacttccagctatgctgggcagactctcaggaatctgagatctcataataaactagtacagcccttctaattaatttttaacattatcctttataaaatcacagctcagtcttaacacgtgcacccagccatgggggttcttcatcatctgtctatgtagttttttgtaatagagaacattctgtatttttaaagatgatgcctttggttttattattcaaagttcaattattaatttttggtcagtcagcagtttagcgttccctttatataaaataaatgaaattattttataacttgatgactaccaattgttattgtttcctgggctgcaaagctgttaaagctagctctttaatgttgcatgaggatgtgaacattgaggtgttttcataacaacagcctgcaggggaaacgctctgtgggcactctgccatatgaactcaagcacaccactcatacatgggcttcctattttccttctcccaccttctttctctgccttcaaagcccatttcagaaggttcctgagctccatctcctgtcttaggtgtgctgtggacattcagagcatagccagctttctgacatcccacaatcccataattattcttttttctattccaactgtgtgtctttcccatctgctcaattggtctgtgatttatccaggattgagctgctatcagttcttttgtgaagcatccatgacacccctcctctttcccccactgagctaaccagttccccagtatgtccacggctcacttagcatacccctacactggcttgtacccattggctcttgtctgtctacttatctgtctctccgatactctagaagcttgcagggagagaccacaccaccatacctgacacacagtcgatgctgtgtttgatgaatgaatgagtggtgaaccataccgtgcttctgtgtgcagttacccccagctgcactccctccctctgattgccctattgctcccagctacctcctgttctcatctgcctccagtctgacccatctccacccagtccaactcagtctccaaggtgattattctaaagttcacatctgatcatgtccctccatcattgcctatgaacaaagaggacaagtccataaaataatatacaaggtcctccctctacaagcacgtgccttaccccataatctgctgctttcctccttctacttcatgttccccaaaatatcagaagtgccaaactagcagctctctatacacaaaatcctatttctcaacaccacacctttgatgatgctattcccagtgggtgagaagcctgttcctctcaccttctcactgccctcacaatcaactctgagccatcctttacgactcagttccaaagctgtcctccccaagaaatctcccacactccccacagcctgatgaggatcccttgtctggactccctctgcccttctcttaaagcattggctacgtagggtagactatatgggcagtgcctcaaggcatgaggctcttgtcttgtccatctctgtgtccctgggggctggcacagagcctgcaccctggtttattagaaaatatctgataaacaacactgtgttgaagctccagaaagaacctgtgtctcagctttcttggagcccctcatccttcctggtcttttttctgcactcaatagcacctattgtcccttgtaagaactcagcaagtattgggaactaaagtaaattaggcacaggtgggtaaagagtgtattgtgcttttctgtagctagaaactagagtaacacccactgctatactgtggcaaaatttatttccaaaaaaactttcatcacaagagtgcccccaatcacttgtttaaactggatgatagaatataaaaaaacaaaaccagaaagagtaattttgaaatatcaacaaattcacctaactaatgtgccatgacaataggcaattggtaagagtagcactattgtatgtaagtaagaaaatagcatgaaactcaataaaaacatagatttttcaggttattaaatggaagactagacagaaaaggaaatgagatgtgtaggcttgtagtaatacagtatttgtctacatataacttggataaaatctgatttagagttggtgtgtctccataatgctgacctctctacttcaaaatcaaatcaatgtattgggttaagttaaaagctagtttttcccttcaactctgggcttgactattttgtcagtaaatttaaaaataaaaagaaatgcatccatttggagagctttctaagagtttgccaccagatcattgtgtgtcagccagactcatttatttccttcccctccctcaagtgctcccaagctccctaggtgcagagctcattgataactctgcacaacttggacctgggccccatgtaggatatagctctctctccagcatacttctagaataactcttcagcgtgtccacaagtgctcatggagagtcccctctgtccacctgcaatgaagtccaggcttcgtgaagccatctgagtagagcctcacttttcactctgcatccaatgacctccaggagccacagaccatctcagtgcccaagtggcctgataacccccagaaatcccacctccttaactgatgttactctccagcgcctggcctcaaagcagcagcacttgtgcctaggggcacatagaatccatccttatctggggaaggcagcctcttcagcttaggcccatgctgctgtctgtggggctttggcctagttcatgaggcaggggtggggagatgtagcctccatagccggactctgtctccaccaccataaccaatcattaaaaaaaaaaaaaagacttgttcactgccactttatccttcagctcccaaataacctcaaaccaagagattaagccctcagcccagcccagccccacccaattccaggcaaagaatttctagggacatctgggatgcaatttcttggtccaaaatgtccagagaagagctaggtcttcacctttggctgctgagtttttatgtcctggaatattcccaactagtatgaaagactgctcggtgccaattttgacctttcaggactctgcctgtgcaactaagaggagggctgcatttgttggtgctaactcacatgacagattggagcacaggcgttacacaggagctctcaggactgagtcaccagatgtgtgaggctctggccagttggtccaatgtggtgtgagagattgtaaagtatatatattatatatatatatataaaatatatagacatatatagacaaatatatagagagacaaatatatatagacaaatatatatatagacaaaaatatagagacaaatgtatatgtatttatatataaaatatagacatatatatagacatagagagagacatatatatatatatatatatatacacattttggagacagagtctcgctttgtcaccaggctggagtacaatggcgcaatctggacttactgcaaccttcgcctcccgggctcaagtaattctcctgcctcaggctcccgagtagctaggattacaggcacacgccaccacacccagctaaattttgtatttttagtagaaacggggttttaccatgttgcccaggctggtcttgaactcctgacctcaggtgatccacccgcctgatccacaagcgtgagccactgcaagtagcctgtaaagcatatatataatatgtattttatatattttgtgtatatatatatatatatatagtagagacggagtcttactctgtcaccaggctggagtgcagtggtgcgatctcggctcactgcaacctccgcctcccgggttcaagcaattctcctgcctcagcctcccaagtagctgggattacaggcatgtgccaccatgcccagctaatttcttttgtattttagcagagttagagtttcagcatgttgaagcacgtatttttaaaaaaaaaacattcagacaagtttgcctctaaaatttctactcttttctgtaaatattaaagagtgaagctcccactatgttctcagtcaggtagagagattttcaactcactccttcactcgataaacatttattgagggcctactggatgcctggcactgttgaaagagtcaaagatacagcagtgaaccaaaatgcacttttagagagcgggagaaagaggataaacaagtaagtgaataatataatatcagactctaataagttgtgaaataaacaagactagatggagaattgaagggtttcttaaaaacttttatgatggaaaattgtgagcatatataaaagtaaaaaaaaaaaaaaaagtctaatgagccatatagatccactatccagttcctacaatgatcaaatcaagacctgtcttccatatccccacccaccctcccactttggactattttgcaccagattctagacatcatatcatttgcttataaatcttttggcatgaatctctaaaagaaagggaatgctatgtagataaggtagtcaaggaaggtggctctaaggaggtgatctgggagaatgggaaaaagagttccactggtggaaacagcaaagcaaacagctgaggtagttgaggatctgcaaaaaggccagtcggactatcccagagggaatgaggaggagagaggactcaatcctaaaacagcaatatgaccagaagttcctagaaggaatacaattattacagcaaaacttatatggggcttattatatggcaggagctcttctagtattttgcctatattatctcatatattcttcacaacaaccctacaatgtcattacaactattataatcccattttactacaactaaagaaacagacacagagatgtgcagctaactacgggcagcctcagaatttgaactgaggcaatctagttccatatttcaagttcttaatcgtttcactgtgctgcttccactttcaaggtagaatggtgcattaattgcaagacacatttctgagcaactctgtgctgcctcttccagatctctctaaaccaccaccccttctcccactgacccctaaccccagattgccgccccctccaggtctggatactgcttcctggccagcttattttttcctacttcccttctcttcccacccaaatttttttccctgttagctatactccctatgagggtggagaacatgtcagtctgtcattcgcactgtatcccctcacacaatgcccaaaacatagtgggtactgaataaatgctcggtcccacaagactgacccccacttcagctgcctgttgcaagtagggggtccccagattacccacacttctgtccgacttggctacaaattggagattcccaccattccctcctcatgcacaataatttgctgtaatgggtcacagaatagagggaaacatgattatcagtttattataaaggatacaaatgagtgatcaaatgaagagacacataaagcaaggtctgggttgggcccagtggctcacacgtataatcccagtgctttggaaggctgaggcaggaggatcactggagcccaggagtttgagaccagactgggcaatgcagcaagaccctatggctacaaaatcagaaaaaggcaggagaggtggcatgaacctatagtcccacatacttgggaggctgaggtgggaggatggcttcagccccagagttcgaggccacagtgaattaggattggaccacaggactccagcctgggcaacaaagggagaccctgtctcaagaatgtaacaaaaaaaaaaagaaagaaagaaagaaaaagaaaagaaaggtctcaaggggtccagagtgcaggagcttctgtcgccagggagtttggggtgtaccaccctcccagcccatggatacattcaccaaagagaaactctccaaatctgttgtatagggttccattatgaagacatgattgctgaaatcattggccactggtgattagctcagtccccagcctctcttccctctccttcgttcgggagtggggctgcaagttctatccccatagtcacagggtttggctactctaccagccaggtcgaattctcctagagccacctcattagcataaagttgggtgtggttgaaagagggcttcttaagaataacaaaagatgtttttcctacccctattactcagaaattccaagggtttaggagttctgtgtcaggaaccaaggatgaagacaaaatatatatttcttattatgtcacaaaatgatatgttccacccagatcccctggaatccctctttttccatgagttgcccccacaccttgggctttcaatgacctgcatctgaaggctttcttccaaggactccctcaggctccaggatccatttgaccccaagagcaaagggccagcagtgcctgagcattgccaaccctcatcttcaccccacgggctgttaaccaaggactgtcaggtatagggtatgacagcccagcttccttcccatagggtgggacaacgctgagaccctacaaacactccagagcctcgagctgggtcagttttcctcccttcccttttctgtttctgggaaagctgaccaaaaaccttaggttaccttaaaaattcctctgttagccaatatggctgtatattggaacactcacagaaaattactatacttccaattttaccattaagtgaaaataaaatataattaattctgaaactataccaaaatcatgggattttacattggtgagtcaaagcgttgtaggactatctccttagttcagctaaagatgaggtccttgtcatacagccatgaaaaattaggaccacagacaatttgaagggtgagataaacaggatttattgggcaaaaagggaaacagggactctctgcaaagccagagtccctgctggtgcacttcctgattgaatcccagcttccacccaggaagaggaggggccaggctcctccctgctgcaaacagcgtggatttctgtggctccaccccagtgcacattcttcccagtgcgcaggctggttagtgtttctctggggactcctttccacctggctgtctcaaaaggtattttaggatgttgcagtgcctcagaggcatctctcaatctcaagcaccccagccccaaaaatctctcagcagtggtcaatggagacagttggcagagagtgggaaggtcagcatctaacacattgccaccactacagggaagggtgggcagacagtgagcagcaaatcctggctcattactggaactcacaaaacaggttttctaactgttatgagggtgttgttataacacaacaataatgatgagacccggggggaaaatttagtaggataaaacacacatcaaccacgttgttgagataaatatggtcactcttccagtatttgtctactgataatttcttgactttttaagagaagacttgagggtaagatgtggaagtactgatttggttagaagaatcccaaggaaccaagagacactttttcatacacataggaaaagtcaaggtcctaatgtatgtaaatgaactcaaaagctgcatttgccctgctgtttctaggcatccacggccgagtcatttcaaaccttaaatgaagagtgaatagtgatgaatgcgtttatgaatatcctcatttgaaaacaatgacaccgtagtcccagggttctaaattgaaaagttagtagcaaaaaagagctgctccaaaatccatactctataaaatccacatagctcatgaggagaatgatagaactatagatcatgggcaattatgctccaaagaaaggttttgaggcagctgcattcataagtccctcttagaatgaagacataaacataggaatataataccatagctaaattgcctcatcatgctgccgtatttttgtacatgagatttataataatagaatcatataatcagcccatttgcatgacaaatattatgactactaatgttcagatttaaggaaactgaattcttttcaggatacaaactatgcatctttcagagaaagagaatatgggacatgacttagagaaaaactttcttccatcatgtgatactatgtatggtgacatccatatgacatcatctaagggtgctccctagggagactttatcaaagctttttttctcatcaccatttagtgtacacagacagcaaggagatgcacaaagtatatagatttggaaatatggatttattctcattatgagatgagcaccaaatatccatattgatatgtagacatagaaataaatcactgtaaatcctaaaggaattttttttttttgcaaatctttttcctgcattccctcactatcaaatcagcaactgtgagatggactcattcacaatattttgacatgaggcaggaattagactccaaaatgggtgcccttatggaaacctaacgaatgttgcaaactaaggatgaggaaaacgtactataaataaggtaatgtcttctcttgctgtcacctgctgaccctggcttcagactctaggcactactttctctacagatgagctaatcccatcaaataggacaggcccaagacaagcagatgaagccctgttttaaatacttgttgcttatgctctctactctaaaatacttttacacattcttcaagctgatctttttttataagaaaaaaaagtaaaataaaattgctctaaaaatagggaatagttacccatgttcctattatttccaaagaaaaaagatatttatggaggtgagttctaattccaagttgattaattcaaaatcttcatgcacagtataaaccatcagaacattagctaccatttattaagaaaataatgtatgctaggtattaatctaaaacttttgagtgcattatctcatttaattctcatcctaaccctgtgtgtgatattcttttcatacccattttacccctaagaaaatgaagtgtggtttacttaaagtcacaaaccaaggcagtctgttttcagagctgatgccctcagctgcattaatgggtgagcaggggaatgtgaggcttggagcccttcctcactggcataaaactacttcaaaaaattattctgttgttgtattctctaaaattccagggaggagaaaactgtcttaagatatcaatgcttctcttagtgggatttagactccagaagtagaacttgatgtattcaaggcccagaatccatttgtatacaacataagaactctagccctctgcaaatccttcctttagaaagcttccacatttatcaacaagcatacaccagaattcatcatgtcttttaagctagtctgttgaaaacaagaccatgtattacagtcagacttcatttgggccatcctttgctggttaggtacattggcagtgaaagatctgaaggcataaacttggcagcagcttcaaaatatccagttggtcccggaacaataacatgctcattatgtgcatttattgttcctgggttccctgctgtccaaatctacccggagtctccaatcaagaaatatcgataggagcagtgctaacatgatatgactggggacaatacagagtgacatgacccgaggtgatgagaagaacacgtgtggtttcctgaccaaccccttcacttccctcccacatattttaatgcatattacatccctgccttggcagtcacagacagagaagccaaaagatatgtatgtataaagttacatccatcaacaccaccagtggtcctcctggaatgccgtcagcttacagattggcttgcacccactgtctgtgcacaccacactccgtgactgtggttctagctctagttctacaggaacagcagggcatctccccagaacccagacaacttccacaaagacctactggaatgacggtaggaagtaaaagagtcatctgagttggcatttgcttcattaagagggaaaggcagcaaaaagaggaccaaattaggttttaagctaggaccagaatacagaggaaataaacattaaaaataagccaaacctatatatttgtggttgccaaggcagccatccaaagcagttgaaatatatccatttctgaccccaaaacacaaaagcttagaagcccacttttaagtagagactttgttttgtattcagaataattgtttatcctttatgcaatacctgaatttgcagcaaactgcatgggactatatctgaacaacacactagtgtcctaaatgtaggaaattctcaatctatgctatttggtatccagagaataattctataatttcctatatgaatttttgatcaacatagatgttagggaaatgccttgcaattaataaaaaatattttcttttcattaaatataaataattgtctatctttttcagagagcattctgtatgtagatacttaaattgttcacccaaaattcatggaccaaatccatagtcaacattaagatccaactgaacataatttaatcatttgttgaggatgaagaagtttattttgagatattcctgaaactcaagaaattcattatgatttcaacttgtattgcatgaaagaaatgcaaacatggcaattgacagatgacctaaaaatattgtaccaatgggcagtgtctgtaccggcagttcggagacagtatttcccaagcagtcttctcacttcagaagttaaaaaaaaaaagaacacattatgaactcttctcactttaggtagtctacaaacaaggagagttacttctggatgcatagttaccccacctatcctttaaagacatactccaaaaatcaaaatcaagaccaacctgaattttaaatcccatggtggtaatctgggataagacagggtttctctttaggctgatgagtgagaatttttttctccttaaaaagaaaatcattattgtcttttaggagagagataaaggcaaaagacataaagtaatcaacttaaaatggattctcattttttttaaaaaatgtgctgggtcagcagaattactgaagaacagttgtgtgaaatttagttataaatgaataaagaaaccgataagataaagataccacattaatgaaaaaatagttattaaattcctgtcctttttgatgttttctctgataattaatatttccttcttcataagatagtataatctctaggcaaatttccaaagaaattaagaaataaaatatgatttgaagggaagaaggaaaagagagagagagaagagagactgagacaaaaaatgaagaaaggaaagttttaaaagtggcatttttagaagagcttccaagacttgaattaggtatggcattaatttttttccacctagtcttagtcgtggcaggtttctgaaaaaatgcaggaatttcatggatgtgggaactggtgatggaaaatgcattatttccaacacaacaattgttgtacttgagagaaactatatggggaaaaaaataacaccctagaataaatacaaatgaaattcatgtatcaaaaccaatactgtgaaaatagtttaaatgtttcttgaatttatatctagtcattaacctaaatgcagattttagttgaagccacacttctgcctcatggtcagaaggcctgaaaacctgtggcgtggaaaattggcaggaaggagaatattgaattggtctccatggaaaaacagattttggcagccataacctcctccccggcaggtctctctcccactctctctttcttcctccctgtttcactcttgtcccaggaaagaggctgaggaaagaccatgtatcagctacaacagcaagcagttgtcaatctgaccattcatcgaacaacctttctcattggcattgaatcctgtggtttaggttaaagccccaaaattgtcgcagccctagactcaccctctgagagcacggaggccataaattccatttctactggctttggtttccttctcccctcaaacaagaaagtggggtggaacacctgcctcgctcgatgtccctgaaagaaactgcaattcacaaatggaaatgataaattcattcttagaaatcctaaaaatctattcctctctttccccgatccccatcctgtttactctcctattctgtctggttacctcagggaaagcagatatttcctgagttttatttagtctagagggcttctgcgaaatcatttctccaccccagaaggtcctaacagcccacctcacccctgaagttcaggctcgttccctcctgggctagccctaaacccagactccaccaagctccccaacattttccttccagcctcgtttccatcatccccctaccccagagcttccgggggaatgttcgccacgcccctccggtgggttccaggccctttgcatgagcgaattgaggcgagaactacctccccagagtcaatgttgtgtccgtgtgctgtgcctgtgcctctcggtggttttcacggtgatcttttctctctttgcagctggttaataatccactagcaagtcaggctgcagcggctgcagcagccatgagctccatagcaagctcacaggcctttggcaatgccctctccagtcttcagggggtcacaggtcaactagttactaatgcacaaggacaggtgagtgggagatgggaacaagagtgcatttttatggcagattgaactcggaaaggaattgaatttcttttgcatgacagtgatatgtaaccgcatctattcgaggcaaataaataatgtttactagcaatgtcaagaataggagaagggttgggaggtgtttctatgttttagaagcaagatttttttcctacctctagattgccaaagttttattttgtttttatctctgtactatgactcatgttatgaccttatatgaagaagttactttgcattacagggggcattctttcaaaaagaaaaaagttacatcttaaaaataaaatgtcagttttgcttttttttacttttcacttaaggaaaaacttggataatgagggaaactgatcagtttccttccataattgctgtgagagagatatcaaaattagtcttaacaaagccaatttttgaatgtatgggaaggtgatgaagaagtcttgtaaaagcaacaaagaaaaggggtgagttagaatgaagccaattgcaagtcagccccatggtccctggcctcctgccaattcctacggaagccaggcaacctctggcatgcttgttgatttacttcagtatgtcaggggtagtaaactttcctcatgtcatgagagagggtctgtcccctcaacgctgctaatgtgccacataatgttcatactagatcctggaagagcttcagacaacccaataaacccaaaagctgcataaaaagcaaacgagatgaagctgatgatgtcggggtaccctccatctgaaggcctgtctcagagcccagtggttaggacacttggttctccagtgtgactgatcatgaaatccaagggagaaggagctagcattctcacaaagacttttccccccagccttatctatttgcccagcagtgtgtttgcatactccctgcttggcctgttctgtggagagcaggcattttgatgtcttgaaccctgtttttattttacataaagagtaaacaaagatgcattataagctaaatcgtctctgtctacattccagggaaaaaaagctgaccttgttttatttcctgggcgggtgtggtattgtcccgtcagaaccccgagggctgaacgatggagcttgtcaaagagaggccccatgtaatgaatcatcttatcacaggtgcacaccgcacatattaaaggagggttgtatgaacactgtgccctctacagtaacctttcaatgtctgctttaacccttgttccaatcccttttcatcaaaggatcattttatgcagccggctctaaatggaggctctcaaaagcctattaagatttctggagggacggggtattggtgtagaggaaaagttggttttaatgtctgtaactcatactcacatcaggtcgctgcttcgtagagctgtgcccagaaataggacaccctgcctcactcctgccagggagctggcccttgagatgtaaattttaggagttcaagatagaaaccatatccaccgacagatatttccttctgatttttttgttcctacatctaagtaaaatacactgatatgctccatcacttgaatacttgtgatgcagaaaatccattattatttagaaggaattattaggagtttattcttctgatgatttaagggctgattactttgccaattagatattctcaggagctagagttactacacttgctttttttggcctttgccaaaccccagggatagctttcccagcccataagtacccattagaaaatgatcttccaagtagaagattgattggtactgtgcatacattgaataagagttgactttaaaatatcttattttagaaactgtggtatgatcgtttatttgatgtggcatacaaacctcttaaagtggaaaaaaaattacattcacagagaaatcaataatgcctactcatgaaatcttaagttttaacacatgtgcccaatggggtcatgtcttccacctagtgcagaaacagttcaagagttaaaatactcaaacttccagtggataattggccatattcatgtagtgatatggttggttttgtttgtttgttttttgtttttttgatgttcagaatataaacccggttatcttcccaggaaatggtgcatgtcctacaactgttggcacagagatacttgtgtgaccctatgaagtgaggtgaacagcctgtggtcaaattacaccaaaagagataggcaaaaattttgtgttttttgtttgtgtgtgtgcatattcctttggcttatgttaatgtggcacaaaaggtagcaatacattggaaccagattcttacaattagcctttctcaaaataccatgtaaagtaggattactccacccagcccattttcaatttcttaaaaatctgcatagcactttcccagaaaaggtacaaagagaaaactctgaatatgtttaaagattctttcacttgagttcttgacatcaactattgtttacatttggaagttcacccaagagtaatcacgttaaaacctaaacctaagtgtggaaagcatgttttactctactgatagtttggtgaggttaggtctgttgagaagggtggggtgagatgggggttctcttatcagaaatgttctgatcctccccttcctctagattcttttggctacccggaaacaaaaagcaagattcattagttaagactttgaattcagacctacctgggattgagtttaggccccacctctttctagttttatgatcttggagccatgacttaacctacctaagccatagtttcattcttaatgttcaaatggaacccacatgaggcagccacgagacatacccagtgtctcacagggcccacagcctatgccagtggtgcacttttgcagggcaagcagtcctaaggctgggcagatgtcctcggctgggcagatgtccaccccacgtggggagacatgccagaatcttccgtcagggtcttggccctcaactctcaacagaaagaaatcccccctcctgggacttggcagttttgcttccctatcttggcatctgactctgtttctgttaactggatatcagtaaatttaaagagataggaaatctccatatattgaagaattttattactgctcctttttttccccaaccagtagttattttgagcaaacatggaggaaaaacttcagttgtttttgtaactttctaaccccacccattcgtgtgtcattcattcaaagaacaggcactattcaatagagttatgaatttgaacagaaatactgcattctaaggtcatagagtagaggccaggcatggtggctcatgcctataatcccagcactgtgggaggccaaggcaggtggatcacttgactccaggaatttgagaccagcctggacaacacggcgaatctctgcctctacaaaaaaattagctgggtctggtggcaggcacctgtagtcccagctacttgggaggcggaggttgcagtgagccaagattgtgccactgcactccagcctgggtgacagagtgagaccctgtctccaaaataaataaataaaatcataaagtacatatcttacccagggatgttaaaggctctaaagttatatagtacccaactccactctgaggtgggaaggtagcatgtgtcctcctgaaattagtagtcatgaaattgatcatgactatggcattgctgagaaaaacatcctagttctctttgtttactggatctggaaatcatgcaagtgtggcaggtgggcaatggaacgggtgctagctgtggacttgtttgaattccaggttggcccataactggctctgtgacgtcgggcaaattacttgagctctctgagcctcggttttgccaattataaagtaaggataataaaatctaagctcctaggttatgaagattaaatgagataatgtgtggggaaagcctaccacagtgcctgagtacacaggtattctcagtaaatgattgcataattatcatcatcatcattgttaagagttttgactcatagtttccggaaagctatatttgatctggacatgcagcaagaggcagtacagtgtacaagcaaaaagaaagagttctggagccagactgccatccaccagctgtgagactgggcagtttccttattctgtgcttcaatttcttcatctgaaaaatggagataatagtaacaccgggtcctaggactaaagtcctgagaatggcatcaggcacataatcatcactcaataatgctatcatccaataaatgctacctattaatcaagatggtatgtgttttcagttcataactgtgcacaaaaacccatgctgaagtctgtgtatgtgtgaggagtttgagaatgtgaaaatcttagtagtaggacattaagttattttaaggaaatcttacccttatcttggatagttcggcagggaggagggaaaatgtgagtgtatatatgtgctcttaacacttattcagtgggtatgttcaagatttggcaagtagatttactatcgatttgttcagctatagaattggcttccctggtgcccctggcaatatctccttattggcgttattgcagaaaagtaaaagcaaatgaaattttattatatactggtgctaaagaaagcattctacattttaactgaagctcagaatgtttcctgatgaaattaagtcctagaccactgtgaaattttcttaagtggcagcaagtaaagtcaaatgcgtttgtccttaaaaagccagtcaaggggggggaagtcaactaaacactattatttcaatgtattaaaaagaaggaaaagtaaagagacttacctagtcaggttactcaagaacgcacatacatatgacagctgagcagagttggtttggtgagatttggaaggattttctggatctgtgtaggataggggctgcctcctaaaatgaccacaaggccgtgatgaaagaaaagcaatcaaatggttctaacagtagcctatgcattatgacctagaggatatgcctttgattgtacaaaaccattgattgccactcaactctattcaaaagctctaggctggagaggggtggatggagaggcaggaacaccaccagcatcatagatggacacatcaactggaaggccatcccaatgtcatcactttcaaacatggttaaaaatacgtatcttagaattgaagcaacatgacgttcagatggagatgttgctctgggttgtaataagacaaataacatctccagagagcaagagagtagctaaaagaatggacttttattggaacccaaacactgtcacttcttagttgtgtggaccttggatatgttataaaacctttttctgggcctctgtttcctcaccagtaaaacaggaatgataggcttctcacatatatttgttgcggggttaaatgtggtagaaaaagtgcttggcacagtgcctgatatatgccataagcatttaataaatcatggctattctgttaggatgaaaaaccagcaattaaccctgaactgtgggttgctaaagtaattagcccatcatttaaatacatgagaatcttttaaagcaaatcactgcaaaataaatgaaaataaagttgtagtaaatgcaaatctcagccaaaggattgagatacaatgaatttattcagtgagtgttgagtccctctctaggttttattagatctgccaaaaagaactaacaaagccatagcttaacacatttgtaaaattattttcaaaccccatggaaaagaaatatgtgtaattctgactatgtgactaaataaatgaggtgcattagaaatatcctgccaaagccagttgatcaggagtttagggagattcacatatattactttatttcattttaaacaatgaaacatgttaaatgtatagaaaataatttttgcaaaacaatacaaaaggcactcttgtttaaccacctagatattaacaattttttccgtattagcttcagttttcttgcctttttttttttttttttttttttttttttttttttttttttgagacggagtcttgcttcttgcccaggctggagtgcagtggtgtgatcttggctcactgcaagctccgcctcccaggtgcatgccattctcctgcctcatcctcccaagtagctgggactacaggtgcctgccaccacgcctggctaatttttttttgtattttttagtagagacggggtttcaccgtgttagccaggatggtctcgatctgctgacctcgtgatccgcctgcctcggccccccaaagtgctgggattacaggcgtgagccaccgcgcccggccttcttgcttatttttaaaagaaacagagggataggagccgcgggaagcagccacaaaaaaaataattaattaattaattttaaaaaattttaagaaaaaataagaaacaaaacatgacagacacagctgaaaccgtagcaccttcttctcccattcccaaggtgattaccatgataaaatgaacactttccatgcacgttctgcatttttactccaaaatattcattgaagaagcaagatacgaaataatatgtacagaataataccatttttaaatacaaaaaaggcaaaagaatatattgtttctatattttgaataagtaagaatcagacatgttttgttgaaaattcagagttggtgtctgtatgttttctcacaaatattatgaacagagcaatctattcatatcaccttgcttaactaatggttttggccatctttcttttataagccaaaaaaaaatctgaaaaagcttgtattgtctcatttgcaatgtcattgtagcaaattttattttaaaaggtgtaaaaattaagtcacgttgtgtgaactatatacttcaagtagcatttttttttaatcgaataacatttcttaaatcagctctttctagagactgggaaatatatatgttcatgggattagtaacattataggaattttaccctgacttcatctgagttataaagataaaacaataaacctcaatctttctactaacatatcaaatttccccttagagcccagttgagagctttagttcctcatttcaggagaaacagttgcattaatgccgtttttccctaaatgtgcgcttcgggaaaataacgagcccctcaagatgccccacaaacgacggtcccctggtccgaggagccgggcagcgccgcgcagccgtctcgcgtgggacccacccgcgggcggagccaggcggcagggctgccccaccgagcttcaccccagcaacccctttaactttcttaaccctgtattccccaaccgaacacttcccagagttcacgctggcagagcccacttcaaaaaatgctgcaggaagccattcacactcattcctatccacgtttttaaaaatgcgaaatagtgatttaaatcagaacagaacctcttccaatgggggtttcctttgcaaccggggcttcgcggtgatttctgtgctgttttgagggcacacacctacataacacgtttgcagagataagggatctcaaactgttcccaaaagtcccagggactcgtaatatgcaaaccgagggcaaatgaacgtgggaggatccgaggcgctcgctgaaggggctctcctgcagtgcccaggcagagggagagtggagggggcggctgtggagtgaagggcggaagtgccctcgccgtcctgaggcctgggaccctcttgatggtaaatggcgctgttgagccccgatgcgcagggactccgcgggcggcggacttgacaggaagctttgctgcggggcggcccagctgcggacgcgcgggacgtcagggccccagcagaagcgccgggctgtgcgtccttaagactgcgggtgcggccccgcccaaggtcgccccgccctccatccttctaccccgcccccccaccacatttctgaaatgaaagagttatcaatcgctttagggttaacttaaagaactgaaaggaaagccctctctgaactctttctttctaccctccttccccagcaaaactcagcagtgcaggctgccatgtaccataaaatgggtgtgcgggaatgcacagtgagaaatctagtttgcaggattctctctgaagattgagctagagaggaccaagttctctctcacctaaagcagaactgggatgctgtcacttttcccacttctggctgctgcagcgttttgtttatctttttaaattttttgtttgtttttgttttttgagacggagcttcactcttgttgcctaggctggagtgcaatggcataatctcggctcactgcaacctccacctcctgggttcaagcgattctcctgcttcagcctcccgagtagctgggattacaggcgcacaccaccacgcccagctaatttttgtatttttagtagagacgggtttcaccatgttgtccaggctggtctagaacttctgacctcaggcgatccacctgcctcagcctcccaaaatgctgggattacaggcgtgagccaccgctcctgccccatctttttaatttttatccatgagtatttcgttttcctgggaattgggaaacgttttcttgtggaggctcctaaatctagtctgttggcacatcctgtctgtctaaaggataggagaggaccaattaactaatgaagcaacctaaataacagctataattctaaacaggtactacgtaacaagatgccatttacaaacagctccctcagagctagtctgacatattagatctttctttcatgagcatagtttacattccaattagtgcccacttatggcaaaatactgtaacgaatgttcacatgacttcttactgtgtgcaaagctctttaactggcttaattcttagaggagtgctaggctttagctgaatgttcctttgggccaagtgacttccagaaaagaacaatgaaaataatatctcccatgcattaagccttcaccctggggctggtataatctataatcctaacagagcagttcatggtaggtttgactatctcagctgcacaaatgagcaaattctcaagacatcaagggttaagtgactccctgggataacatcttctggaagtggcagaactgagatttgcgttccaagtccattcccatccttccatatcaccctgattttctcgggttcagagtcctggttcatttcctggctgttccgcagacatgtcacaaactccagaaccttcatttctccatctgcaaatggcaattgtaattcttgctctgtcaacctcacagatttctctcgaaggcatacacacacacacacacacacacacacacacacacacacacacacactagaaaactgtaaagagatgtaaaccttaccgaataattacagggtattttgattggtatttttactatgattatttttgctaatcaaagaaaccagacaggtagtgtcagggaattgtctaaagcaatgagacattcttgaaaagtctgtatcagatctccacttcttgccagagaaaatcgccttaaggtgtccataggtgtcctggcttccagtgaggcaacctagcaatgaggaaagaaatgcatggtgagtgcttcgtatgggcactcatcaaatgagcctttcagagctcaatagaaaaccctatcccagtgaatcttctgttgtgctgaagattgcagctgaagattgttgtcccacacagcacagtgatgttagaattggttgagctcctaatgtggcaagaccccacacatttctagatccacccagaatgaggtaaacccttccaaagaaaaagagaaatatcgaatgctgtattttgagtcttcttactctgtgggattgatagagcaagaattacaagaattcttttgagtctaagacaccactgattttaaattacacttaaagtcataccagtgatttttggagaggaggaaagaaaataccacatttaacaagtatatcaattgttagaagtagcctaatttcaaaaatgttaaaaatgtaaaaaaaaaaaagaagttatcattgaaatgttgtaattaagggggatactataattgaggaaatatgttatttatatcctgaaccaattccagtatcaataagaccatacaatgggctgttgatgatggctcctttttagtatttaacaaaaagtcagggatgggagtggaagccatttatatctcagcttttccaactatagaatgaaaattaaacttgatttgagtagaaggagggtggacaagaaaaggaggaagtgctgaattttgatttagcgtcctagaacaacatcagttccttctgcaaactatgtttatagttaagatgagcattatcggagaggagaaaacattaaattcacatgtgagcgacattaaactttcaaataaacattcagtatatcatttaccacaccatatgcccaataatgcacccaactttcttattggtctgtgagctgttgacatgatgaatactcttaaagatgtcatcaactcacagagccaataagaaagaaatgagaaataaatcagagttaggtaggaatggaaaagtcacaacttacaacagtgagaggagccagattaagttcaaatgtaggcctttgaatgacccaattgaatttagtgcactagccattactccaaattgccatttgtctcatcaactaagctttcctacctgtataactaacaatataaatagatcctgagaagatgtcatcaggtggagggttcagaatactacagtgaagtcaagatgtgatgcagctttatatttgtaagtaaatgctattaatcaaacaacacaaagatacacaaacaggaaaaaaaatgttgcacactccctagatgagatacttgccaatagatacaataaaccaatctccttagagtaacagagatggacagtgcaaatgtccatgtactcacatgaaaggtggcccaggataaagaacatggactttcaaatcagacaaatctgaatcctgacttcatctgcaagcagctctgcccccgctggcaagatatttaatcttcctcagctaaagttatctcttccatgaaatgacactaatatattcctctcaagtttgttaggaggattagtattaatagcaataataaattaatatgttgctgccactaattgagcactatttatgtgccaagcagctatttatgtgccaagcacttgatatattactttttctttactaccacacacaatatggtttattcccattatacagattaagaaacttccaatatcacccaactagaaatggctggattcaaactcagttatgtctaatagagattgtttttaatcactgtactgtaataataatttaaagtattttgttttgttcactgcagctagaaccaaatggctagaacggcatctggcacataaagaccataaatacagtaataaaatctgtggcctgaatggagtatttcatatatgctaatatgctagtcaataagcatttttgcataaattcatcatttcatttcattctcacaatgattttgcactatcatctctaatttacagctgaggaactgaaggctcagaaaagttaaacaggtcaggcacggtggctcacgcctgtaatcccagcattttgggaggctgaggcaggcagatcacttcaggtcaggaattcgagaccagcctggccaacattgtgaaaccatgtctctactagaaacacaaaaattagccaggtatagaggcaggcacctgtagtcccagctacttgggaagctgaggcaagagaatcacttgaacccaggaggcggaggttgcagtgagctgagatcgcaccattgcactccagcctgggtgacagagtgagactctgtctcaaaaaaaaaaaaagaaaaagaaagaaaagttaaccaactttccagagccatacagtaaatgatagagcctggatttgagcccagatctggctgctttgaagcccagctttcctctgaagcaaagctgctttcagcataacgtgtgtaagtgcctaatacagtgcctaccatatagtagtcatttcataaatatagtgctctcttcatgtgtgtgtgtgtgtatatatatatgtatatatgtatatatgtgtatatatgtatatatgtatatatatgtgtatatatgtatatatatgtgtatatatgtgtatatatgtgtatatatgtatatatatgtgtgtatatatacatatatatgtatacacatatatacacatatatacacacatatatacgtatatgtgtatatatacacatatatacgtatatatgtgtatatatacacatatatatacgtatatatgtgtatatatacacatatatatacgtatatatgtatatattttttaacccactcagggtggctgatctaaagtagagtctgtttgggttttttgcttgttttttgggactgaatctcactctgtcgcccaggttggagtacagtgttgccatctctgctcactgcaacctctgcctgctaggttcaagcgattctcctgcctcagtctcctgagtagctgggattacaggcacgcaccatcacggcccactaattttcgtattttttaatagagatggagtttcaccatgttgtctaggctggtcccaaactcctgacctcaagtgatccgcccacctcagcctctcaaagtgctggggttacaggagtgagccaccatgcctggcctaaagtagggtctgtttaatatattgaagttttatgtggatatgcttttaagtgggtcatccagcattactatatctcatgaaaatggcaattgtttatttagttaactcacttcaattgttttaacagctaacattttggggttgttgtaaaaagtaaaagtaacaaaggatgttaaatccttggcactcgcatctgtcttgaaacccatggtcccgccagcatgcagagaagaccagtttgatgattttgagtcagctgcccacacattagtgaccgggtaagctggacaatcttgttttcttcagattagcagcagcagcagcaacaggctagatgatgcctagcttgcctctatgacatgactatgtggctgctagacataatagcattcacttttctccgtaacaaaatgttgtaatttatttaatcaaaaggcagggccacagagatattacctgctaggctcatttaacaactgttgatttcctctgatggtctagaatgaaaacattcccatctgccttcagtaaatctgcaagtaatgtcagcaaactatcctagataaccaaaaggaaggaacaaataacatggacaaaaccaaaaatctgttttaaattcacatggaatttgaagattttcttgcaagtttagaatggaagccttctttatatgaggatcttctcagtattactgggttataaaagaactatttaggatttttaatacaaagggtaacattactgaaagaaagaatgtttatgtttaaaaggtgatacacaaattccttaaatgaacacaaaaggaaatgacatagtgtgctactccagactctgagaattcattttgatttctgagaccataaaatcatacacatttctaaatatttgaaaagtagagtttctgcccctctaggctcacatggagataaggcagtagaaatgggaatagtatctatggttttgcacatctagactggttcctgaaatccagaacctaggtgaatcagaaagtactaaaaacttaccttctcagaaaccaaatatgatactacaaacattgcttaaaatgctccaatttttttagcaaagttaaatagatttttttaaattctgagttatggattaagttaatggttttgtagctaaacatgtcaatggatctttgatgtaagtatcattattccaccttttccattacttaataatatatagggctagtctatgaatgatatcatctggcaaggctgtgagacatgttcctgacaaggctgtactttgaaactaacttttgagattaaaaatgccaaaattcatgctatcagcataaattataaattattgagcttaaaacaggacagtcagaaaatcattacatttatcgattggtttattagcaataagaaatcatatttcacaaggaccaaatttgaagtgccttgcaaatactctttttctgagggacatttaaagtaggaattagaaaactatgagaaaccacaattggaagagtatatccagccctctttccatacatctatcaaaaactgcctaatcattagggataaggctgcagattgttcacctatgaaaatggggatgcaattttacgagaaaaactcatcagcgtaattcttatgagttacggtctttgttgtgagaaatgagaaattctgtggtctcaccctaaagaacattaaaaaaaattactaacaggaaattgaaaaagtaatatatgtttgagtgatgaggacaacttttttctgattgaatagatagataaatattgcatgcaagtatcaaaatacatttaattttgccacaacaatggatattctcttcacagaaagcatatgaatcatcttggactcatgaaactgagtggtgatgaacagatgcatctttaatggcacttggcacgcttcgttccccaccctctttttttcttagaggcttgttttgttgtttgtcctaatttaaattcagctttacagcttgtatgtgctcactgagtataaacacagcacaaagggatgctaaatttgtacagtattttcttaaagcaattgccaaacattttcttcaccaattcctgttgctccaaaaaacttggaatattggagatcactggtccaaatttagggttttgttgttgttgtttgtttgtttgtttgctaccactgctgtagctcttttttttctcatttgggaagaaaaataatataaacatttcataggtctaatggtttatttaggaatgtttactaaagcttctaaggaccaaagctgagtgaaactaacaggtgttctcccaagcaataaataactttaatctgatttagtcacttaatctggcatcaacaggcagaagcagaaatacttctgcaaattctagatatttttgctggtattaaaacttaaagttcaggcaaagccatataaaggctcacgaagttggtctttccgcaaaatgatggcttcaccacagttgtgcttctcttttaagggggaaaaaatgtttcagcaatttgacagtgttggcagctaccaagaaaatgaaaagaaaccatagtttaatttgtagtcactggggaaaaaaggaaagaatgatgaaaagaaatgtttgcagtttatccataaaaatgtgtctttgttttctagtacctggaacattcttaaactttctagtggacaaatataatcaaaacgtaaaaccactaagaagaattggaaattgaagcattagatcatatttacaaatattttcatttcctcccactgaataagtaatattcaaataaataaataagtgaggaaaaaagaataagtaagatgctagaaatggaaaccaaggccacagtggcttgaaggaattcatttttatgcgatatctcatgtgcccttgttataaataactgtgggtggaaatgtccactcacttttattcaaattagaattctacagataggaaaattaaaatatatccacagatgggaagtttttgggagcgtgatggagctgtgccattgtttacaagtaagaaatgcataggatccttgtgatggactaaagatgtgcagaggttatgactgtggtgcggccactgaggaggagaattgtgctatgcaaagttgaggtcattttccaccatgtgcctgccatgtctactctccagtgggaaatcagtggcttcaatttatgtccttagagaccagaagtcccagtagatcgacttcccacctacaccccataaaataactcagtccggattgttacctgacttacgtaggcattttggtcattttccttcctacagagtggctttaaaatgaaattcagaatagacagatatttctcggactctcaagatctagaaaactgcctgacagtgccatcaacaatggtgcagcaacatcatcttcccaaaaagttcccatctatggatatattttaatttccatatctgtagaattctaattggaataaaaatgagtagacatttcaatccacagaataaggtcatatttcaatgaagggttaactcggctgtccagcagcaaacacatctgagcatgtaattggtcttcaaaaggagaaactttaggagatcacctaaagtcattgacagttgcagcagtttccaggaggagaaaagagcctattgaactcttgtcaacagtgtgggtttcagttttatgtaaattgctgccatcttgactgtcctgcctacagggagcctaggttttcttctccactggtgggctgctggtgccttaagagaggatttacagaatactcctactaatccaaaagagagtgtttacacaaattcagatggctgggtaacatcctggtcttctatagtgggaactaatacaatgtggtatgccctgcccccatgccaggcacacaggaggccctcagaaaggatttgctgagtgagtgagtgagtgagtgagtgatgaatttgtacatgagcaaatgcatgaataaaacaacctcttagttttgaagccatcacagaataaagcagagggattctgccagtgaaaatgctgccactgtctatactggcgtacatttaatatgtaattattaatatttgtacaaatataaccaagcttatatacttaaagcttcgagtatatgttaaccataagcaatacatttcccaggagaagataggcatgaaacaaaatggcaagttctctgtccatttccaaaaagatgcctgaaattccacttcccttgcccaaacagaattacatatagtgctgagcatcttgcttatctggccctttctgggagaactactttgtatccctaagtatttccccttagttacagagaaggccagtcaacgttgattccaacatcgtgcctgtcttggtctgttctggctgctgtaacagaatatggtagactggatggcttacaaacaacagaaatatatttttcatagttctagaggctgagaaattcaagatcacagtgccagcagattcagtgttcagtgaggacccacttcctggtcacagacagctatcttcttgctgtgtccttacatagtggtagggaccagggaactctctggggtctcttttatatggacactaatcccatttgacctaatcactttccaaaggcctcacttcaaataccattatattggacttgaggtttcaacatgtgaagtttgggggaacataaatcttcagtccatagcaatgcccagctgaaccttgacaatagctggagataacattttgcacaattgactcccccatctcctattttcatcgtcctactttctagttgagtaaaaagtattcagagcagtagaaagaaaaaagtaccgtagagaaatcaattagccttaagtaatccagaactttccagtatgcttttcattatgccaatatataattcagatataattttaaaacatgtgttcgtggcaggcacctacaccgtgttcaaaaaaatgatacatttcctagacaccgattgctgcccaccaatcactccaggaatagaccaagaaggtggttacaatgactcctcacttaattctcatctcaatgtaatataatcttgtgtaaatttaatttactcttttgattatattcaggatcaaatcctttttctatcaatgtttcctaaagctcgagtggaaacccagataaaagagaacatggcaaatctcataattacagtaaaatatgtaaccccagatactatgctgcatcttaaaattaaaaatttgaggaaaaacaagcacacacaaaaaaaaaaaacacaacacctgcctccagagtgtggagtgtgctagattcagttgtagtattattgtagtaggaactgtcaactgttcagaatggggccgaggctgctaactttattttgccaaaggacccgagaaatattcaagtccgataagaatgatcattgtatccactgagttgactcctacctgggagacgtgtcaattccctgagatgtggactttcctctacgaggtttgctgctcatgggctgcataactagggttcaggccatactctatatgcaaattattcccataaagcacttttggaattggcattattcatcctgtcttaacatcattaagatctgatagaatctcttctccctgcttcatcatttgtaattggaaaacacaggcaaacatactagattacttcttccccaataactacacaaacaaaagactgttcaagagcgtgtttgggagtttggtatttaattaaacataatagaggaaatgaagagccacaaaagcacatctttgttataccttgtaaatatttctggttactaatgggaataaccttgctaacctaactgtcaatgaccatgtcaaaacttctcctgactcttctgacctttttttagatatcataactattgtccctgttggtaggaattgactgttcctgttattaagtttaaggtttcaaaatcttcagaggaacttcagcaactaatgcattcgaatagtatacacgtttaagtcagctgaaacttcaacaatcagtattataaatagcagccgctacctctcagaaataaaccaaattcatagtttatgggaaaatatattctgctcacaatttaaaatgctgtacctctgctagcttcttaaattatctcttctctcttttcccttgtctccttcttgccttcatttctcctctgtttttcaagcattcttagttgacaaagtcctgatgctcattatgactcataaaatgtcttttctgtgtattattggccttaatatttgagagcaaggcagcccctttcagccttctcaatggtgatgttcctctgccctggaacgaaagctcagtggcttcttgcttcttgacttctctgggtatctcaggtaacacaatcttgtatagccactttaaattgcaaataagatgtccagttccctgacaacagtcccagctgcaaccctaacttaaaacgccgttagcagccccaactggggctccttcctgctgcttgctgctgtgggaaagggtagccggcccctcctgctctccctgttggaatggttcccatcctgctccagcttgctagtgatgctctcgaccagtcaggttgaggtgaggaaaggagagaccagcggataagaatagcagaaggcttcctgctctctggaccagccattggctcaggccaactcttgggggcactttcatgagttcttttgaggcccagctgagacctttcattgttatgggcaccatgttttcttccagctgcccctttcctgctcagagcttggttttctccagatctactcttcaaagccctctctggtgttgtcccagtggccattccccaaggggtcctctgggacaggattttaaatcattcagacccatgatattgagcccagagaaacactcacacatccttactcctgctatcatgggagagtagctagggtcaatggcaggcagtgatctttctcactctctttgtgtctccctccctcctcttcctccctcttcttcttctctctccctctctctcaccctccctttttctctctcctccctcctcagctcaaaagccataggctctcaccttttcattcctcaagaatatttcccccaaatttgagagcacaatatttattcagccactttcattatccttgaggtaaggagaaagctccccatgctccacctctggaagtgaggaagacacagatttttcaaaaattctgtgtctatcctctttgtcaaggtctgagttctggaactgtctagctggttttcagtaacctcctctgtaaatccagcacatagtctagtccctcccctggaatgcagcaccagttgggtcttggtgcccccatggaaacttccaatgtagcattctattataaaacagggaagattaaattatatttcataataagttattatcttctattcatcatggtaaacaatttccactttaaaaaatataacattcagaagaattcaaaagagcttttgcaatttagtgtaaatgcccaggagttaccacacaagcatgtaaataaaattaagctacgaatgaccatttattattgaacacttatttggctggtaaaccacagtgttgagtgctttgcatagattatcttagttctcacagtaaccttatgaagtggacattactattcctattttacaggtgagtagactgagatcctaagaggtaaagtaattcaccaatgatctcctactagttggtggcaaagcctggccttaaatccagccagtggggaatttttttttccttggtacacatcttaaactctattaaggagaattacctttaatggcttttaagaagcttttaggggagaggattgtttttattattgttattgctgtttaaataacatcagttttcacgcaaattattcctctcttagtgtgacagaaagtgccattttaaggatcctgacacctccaagttctttactcttgtctgtgagtgtgtttctaaagttgataccaaacagtatcaagaatggacagaatgatgctagcgttaacaaaaatctcttgaccaaaatgtgctgagattgtacaaatatttgggaaagaattgtctctgctgatggattgaaagatctgaggaagtcaccgatttacagcattgataggtctccttttcttacgtatatgggcaacaagattacttgtcaatttgacgtctgcaatcacattctccataacagagtttaacaacatatcattggctataacaatatgtggcctatcagatgacttgtctgaatgccctgggcttctgtgacagaaccctcagactgctgctgatgacatgaacccatcagcagtgaaaacactcaggacactttacccaccatcagtcatgattcatctctattgactacctcaactagactgaggcacttgagggcaatgtaaggataacctcatgacccaaaggtgctccagagccctgaattgctggggtttgctacaactgcaagctaatcttcattatggcttaagttataatagctgctgaattagtgatagtcacatttgggcataagtcactcaagttcttatggaaatggggatctttcaaatatgtgtgctagcaaacactactatttgaatgattttttttagttgctcttataatatgaactttattcctcttttgtgacttatgctcttaactcatttaaggaaagagatagatggacattcacagcaacaaccaagtaagtcctgtttcagagaagccagaactgttttaggtcacaaattattattacaattactggtatgggccttggcctggttaaagcatttttcagagatgaatcaccactggtggagaatcggggcaaagacatagaggatcattgcaaacaatgcctgagctatttgctgtgagatttacagggcaataacttaactgaaaaatttctaatgttgcaacctaggcatagagtaggccatgctttttgaattgaagcaaaagttagtgaatcaagcaaatcctatgccaaggagtcattgaggcattttgcttcacacttggacactaagcagcatcctaggtctacaactgatttccagatctgtagtccctcaccacttgagtccattctgtccacacagtgacattcacacagaatagccccatttcagcacttccctacactcccgtcaaaactcactcatcaagttcatgtcctttgtagggatgtggatgaagctggaaaccatcattctgagcaaagtatcgcaaggacagaaaaccaaacaccgcatgttctcgtcataggtgggaattgaacaatgagaacacttgcacacagggtggggaacatcacacaccagggcctgtcgtagggtggggggaggggggagggatagcattaggagatatacctaatgtaaatgatgagttaatgggtgcagcacaccaacatggcagatgtatacaatgttagaaacctgcacattgtgcacatgtaccctagaacttaaagcataataataataaaaaaaaaaaaactcactcatcggaaccccttggctggatggaatttgaccctcccaagctaacctgtctcaaccttttcttgcattcaactccccatcccccatgtttctcacctttaggctgatctcttgtttagaatggtttctctgccttccccaaatcgtacccaatctccagaccctgcttggcccccatttcttctgtgaaggcctcttggaccatccccacctttcttcctcggaagtgactcattcattcccaatagtcttttgcacagtcaccacgtgggtatagagatttttctcaaagagtacttgctaactcatttggtgctcatcatttccacccttggattgttggaatctctgcattcaaggtacctgtcttgtttacccctcccctgccccagctgcatcttcttggcatccttcatggcatttgacacagtgtttacagagagaagcagtattaggctgctctgcaggaatcctcggcatttcaggagaacataaatctgtctggtacattgagtggcttgaacaggagtcacagcctagttgtccgtgtgctcagtggcaaatccttccatcaggacttctcctagcagtaaatcttagcttctgggagctgggaagtcaaactccaaaagcatcctgtttctaccttcattctcaaagaagagattcccctacagccttgtcaaacctccattttcatttcctgatttagttgaaacatatgtagatgcaaatacttcccttgaatatcaaaaggcctttaatttaaaatatgatttccacagatgaaatggacaacttctcatgagtacagagtctcagatctttgccatctcagctcccccggttccattcttgcgacctctgtgaagtcaaagtccatggaggagttctgattagatctgtggccgtgctaaaaggaatcagagccagcataagcgaaataggcacatcagagaatatttagatgacacaatgtgtgaccatctttacccttcaatgaatgggagccaattgaaaccaacatattgtgatacattcgggaatatgacgaaattccccataatgcactactgagtttttgacacgttgagatggtgaccccaatgcccctgaaaggggaacaaaaataagaaatgcatagtgccaccaaaggcttcctgactttagaactgctcctgaccccccacctccacctccaaggcagactgtctttgttaaaggcaccaatagtcaggtcattacagattcctctggctctgacactactgttatcctatccttgataagtgatgctcaggcctagaaaagaagaaaggacagggtggggaggaacataggcagcgccatgttttagtaatgtgctggcacagttgaaagtgaggttgtgcttaaggaagaggctgatgacttgtttgcatttgcctttcttctttccacccaggaagtaggcagagtatttcattactgcagaggtgagcacaggctggtgtcaatcttcccgggacagaacgcctctctcttcatcacagtgtgttctgtaactgtcatgtgctgtgctcaccctgaaccattctctcaggctacttgctcccactggctcttaatcgcaccgacaccctgccccaaacaggacccacagccctgccccgtagatgcatccagcttccacaggctttcagctcaggctgataggatgaaatgaggctgcaaaggcctaagacactggggaaggccagagtggatgggtcagtggctgagttttcattgtgcatgtgtggaaaggggagttatccaacataagctgaagatgggaggcctgttcctgggcctctcttaccttgcctgtggggtcacaggagccagcctttgaatcctggctgtttaatgcaagaccactcatcaataaagtacttgctatgatctattgatgtggacgcctcctgaccttgcccacactgatgggacgtgctcattgctgatgctgcgggccaggcattgcgggcttgctcagtgagactgcagccctgccacactccctaggggacagctgaccactctcacagtaattacctgaactttattggcctccattgacaaatgccgttgatacttgacatccgcacaagtcctccattagtgccatcccacaggggcttttgtggtggaagcaatggcatagggatgaggaggctttctccagcaagatctgtcactgaatggcatggtcttgcaattctcctgtggttccagctgcatctggagtcccagtgacggctgagtctagaaaccactcagtcaaaaaacatttactgagaaactatgttcaaagcactgctcagggtattgtgtgggtagaaagcagtatcacttacaaacccagcccaccagcagcctttcatctagtgggaaattgcaaacaagacacacagtgtgttttctaagagctggcaccctccaaggtcctccatgctgtgggagctagggggaaggatggaaaagcgagcacgtggggtcagccagacctggactgtagccccagattgtcacttacaaacacttctgtgaagagactcagctgagttgcttggcctccctgtgcccctgtgtcttgtctagtaagcagaggcatgacaaatattacttcacagaggtgttgtaagaatatagaatgcagaggaatcatatgtgtaaaaacacttcctgagatcttactactgtgtcctggtggcccccaggccaggtcaccagatttcacctctgagagccagagcccttgaaggcaaccggaaagcagagctaggtaaccatcctaccgtgtgtggaggcagaaaagcatccacacggccagtgccacgtcgcttctcaggagatgccaccacagttggaaatagagatcatgttttaggtttttacagattacatctgtcactaacagtgtgtccctaacaatatggtctctatgtccagattctatggacacccagtctgtccatttgctgtttttctattcatggtgcctttctccttggcacagtaattggatctggccaggcccctcctgtggtcagtccccatggtccctcgttgaagccagaagccactggatgcagagaagagcctcccctgccacctgccacagaagccccaagcccctcacctttaggccctggctttaaaacacatcatttaaaaggcactttctttctgatttcagtcctcagtagtcatttcacctctattttaagagtttcaaaagcttgtttataatctcaattctctcaagccttcagaaagcttaggtcccttgacaaatgtgccacagtcagtaagtggcacagctgggaatggaatcctgtcactctgtctccagagcccagactctccaccactgtgaacaccagggtgtgtgaggcccctaatcctgctgggggtatcggggagcccctcccccgacattgagagaggagctggatgttggtggagggaaggaggcagaggaaagaatgtcaaaggatcccctagttcagaaagtgtggagccccccggggttggggggtggtggggatgcactcttcccaggtggaagagggccttgagtgctgtgagaagcccatcctccctctggttctgagagaaagcagatgtcagacctgccctggcaaaaaccgcatgtttataccttaacagatgcttgattttatttttaaataagatgtttctcccttccatcacatgaactcagttcgtgtgtacttatctctgctttagatgcctgcccctgccaccttcttccaccacacccccctccagagctgcttgcagattctgagtcggctcccagggagcatcctagagagaccaggcactgcatggtcttcagttgcatgcacagacccttcaccgagccagctcctcacctttggccctctcttgcagattatcgggaccattccactgatgcctaatccagggccatcgagccaagcagcaagcggcactcagggcttgcaagtgcagccaatcaccccccagctcctcacaaacgcccagggccagatcatcgccacagtcattgggaaccagatcctgcccgtgatcaacacccagggcatcacgctgtcacccatcaagcccggccagcaggtaaatgttccaggccaaggcagccatggcacaggacactgtccttacccagcttctcctctttggtctcaatcaatgaaaagtaacttttacattacaaaatagttgatctcactcatctgaacatatcgatacttataaaatggcatgtaactctttttcattcttaatgaatatgggtgataactaaatacctctttaatataaaaataagaatatattaaattacaaacagagagagtgccctaaaattcaatagggatgtattcttattaatctgtgctcaagatacttaattttcagattttcaaaatgaggtcaaaaagaaaccaagaacactcatgccttaactgtgaatgaaaaaattattaaatattaagagatcccaaggtgctgctgctgaaaccactgcctacaaatgaggaaatgaaaaataggaagttctgcttggttgaatttcacaaaaccatgatgatccggttaatttttccattcaaatatcaattgagagcttcctgtgtatttgtgctagagattgggtccacagcacagaaaaaggtgtggtccctgacctcatggagtgtctggttaattggctccttcaacaaacattttgtgataacctactgtatagcaggcccctgataaatgtgaagaaacagaaataaaggagagatgctttctgattttagggagctcatcaccctgtagaggacacagatttataagcagaatctgttgtgcagtagagcagagactgtcctgtgacagggcaggtatcaccacagagttggaagtgaccaactctgcccggacagtttttagtcatcccagagataatggcttgggaatggagtccggacagctgggtatgagttaaccaagtaaacgaagggttaataacattccaagcagagggaacagcaggcacaaaggcagggaaatgggaaagaggatggggtgttgagaaacaggagaaaggctcatgtgattggagcagagaggaggcagaggacattcatagaagggctctataaacaatctaaaaaggatggactttttctctgtgggaccttgaacacactacatatcatctttgtgcccctgttacctcatttgtaaagtggggatacgccagtagctatctcacagggtggttatgaggattaaatgagttaatatatatatgaagtggtcagaatagtgcctggcatacagtaagcactaacatagttgtgatgatagtgatgatgatgatgatggtgatgatgattgtgatggtgatgatgatggtgatgatttaatctgcagccaagccctggagatctatgagaggtttgtttttgggttttttttaaacttcttctaaaaaaaaaagcaaaaacaaaaaacacaaaaaaaaatgagattcatgtgcagaacgtgcaggtttgttacataggtatatgtgtgccatggtggttgctgcatttgttgacccatcctctaagttccctcctcacatcccaccccctaacaggccctggtgtgtgttgttcccctctctgtgtccatctgttctcaatgttcaactccccgttatgagtgagaacatgaggtgtttggttttcttttcctgtgttagtttgctgaggatgatggcttccagcttcatccatatccctgcaaaggacatgacctcattcctttttacggcagcatagtattccatggtgtatatgtaccacattttccttatccagtctatcattgatgggcatttgggttggttccacgtctttgctattataaatagtgctgcaataaatatacatgtgcatatgtctttacagtagaaagatttatattattttgggtatatacccagtaatgggattgcggggtcaaatgatgttccaggttctagatccttgaggaattgccatactgtcttccatgatggttgaactaatttacattcccaccaacagtgtaaacatgttcctatctctccacagcctcgtcagcatctattgtttcctgactttttaataatcaccattctgattggcatgagatggtatctcattgtggttttcatttgcatttctctgatgatctgtgatgttgagctttttttcatatgtttgttggctgtgtaaatgtcttcttttgagaagtctgttcatatccttcgcccactttttcatgggattgtttttttcttgtaaatttgtttaagttcctggtaaattctggatattagacctttgtcagatggatagattgcaaaaattttctcccattctgtaggttgcctgttcactctgatgctagtttcttttgctgtgcagaagctctttagtttaattagatctcatttgtcaattttggcatttcttgccattgcttttggcatttttgtcatgaagtctttgcccatgcctatgtcctgaatggtattgcctaggttttcttctagggtttttatggtgtggggttttacatttaagtctaatccatcttgaggtaatttttatataaggtgtaaggaaggggtccagctttagttttctgcatatggctagccacttttcccagcaccatttattaaatagggaatcctttcccctttgtttttgtcaggtttgtccaggatcagatagttttagatgtgtggtgttatttctgaggtctctattgtgctccattggtctatatatctgttttggtgccagtaccacactattttagttactgtagccttgtagtatagtttgaagtgaggcggagtgatgcctccagttttgttctttttgcttaggattgtcttggctatatggggtcttctttgattccatatgaaatttaaaatagttttttctaattctgtgaagaatgtcagtggtagtttgatgggtatagcgttgaatctataaattactctgggcagtatggccattttcacaatattgattcttcctatccaaaaggatggaacgtttttccatttgtttgtgtcctctcttatttcattgagcagtggtttgtagttctccttgaaaaggtccttcatatcccctgttagctgtattcctaggtattttattctctttgtagtgattgtgaatgggagttcattcatgatttggctctctgcttgtctattgtttgtgtaaaagaatgcttgtaattttgcacattgattttgtatcctgagactttgctgaacttgcttatcagtttaaggagttttggggccgagacgatggggttttctaaatataaaatcatgtcgtctgcaagcagagacaatttgacttcctcttttcccatttgaataccctttattttcctctctcgcctgattgccctggccagaacttccaatactatgttgaataggagtggtgagagagggcatccttgtcttgtactagttttcaaagggaatgcttccagcttttgcccattcaatattatattggctgtgggtttgtcataaatagctcttactattttgagatatgttccatcaatacctagtttattgagagcttttaacatgaagggatgttgaattttatcaaaggctttttgtgcatctattaagataatcatgtggtttttgtctttgattctctttatgcaatggattacgcttattcatttgcatatgttgaaccagccttgcatcccagggatgaagccgacttgatcgtggtggataagttttgatctgctgctggatttggtttgccagtattttattgaggatttttgcatctgtgttcatcaggaatattggcctgaagttttctttttgtgttgtgtctcttcccgattgtggtatcaggatggtgctggcttcataaaattagttaaggaggagtccctccttttcaattgtttggaatagttccagaagcaatgataccagctcctttttgtatttctggtagaattcagctgtgactccatgtggtcctgggctttttttggttggtaggctattaattactgcctcaatttcagaacttgttattggtctattcagggatttgacttcttcctggtttagtcttgggagggtgtatgtgtccaggaatttattcatttcttctagattttctagtttatttgtgtagagatgtttatagtgttacctggtggtagtttgtatttctgtgagatcagtggtgatatcccctttatcactttttattgtgtctgtttgattcttctcttttttcttctttattaatctagctagtggtctacctattttgttaatttttttcaaaaaaccagctcctggattcattaatttttggaagggtttttcttgtctctatctccttcaaatcttctctgatctcagttatttcttgtcttctgctagcttttggattagtttcctcttgcctctctagttcttaattgtgatgttagggtgtcgatttgagaactttctagctttctgatgtgagcatttagtggtataaatttccccccttaacactgccttagctgtgtcccagagattctggtacgttgtgtctttgttctcattagtttcaaagaacttcttgatttctgccttaatttccttatttacccaggagtcatctaggagcaggttgttcaatttccatgtaatcatgtggttttgagtgagtttctttttttttttattattatactttaagttctagggtacatgtgcacaacgtgcaggtttgttccatatgtatacatgtgccatgttggtgtgctacacccattaactcatcatttacattaggtatatctcctaatgctatctctcccccatccccctaccccacaacaggccccggtgtgtgatgttccccttcctgtgtccaagtgttctcattgttcaattcccacctatgagtaagaacatgcgatgtttggtttttttgtccttgtgatagtttgctgagaatgatggtttccagcttcatccatgtccctacaaaggacatgaactcatccttttttgtggctgcatagtattccatggtgcatatgtgccacattttcttaatccagtctatcattgatggacatttgggttgttccaagtctttgctgttgtgagtagtgccgcaataaacatacatgtgcatgtgtctttatagcagcatgatttataatcatttgggtatatacccagtaatgggatggctgggctgaaatgcaaatcaaaaccacaatgagataccatctcacaccagttagaatggcgatcattaaaaagtcaggaaacaacaggtgctggagaggatgtggagaaatagaaacacttttgcactgttggtgggactgtaaactagttcaaccattgtggaagacagtgtggtgattcctcaaggatctagaactagaatgagtttcttaatcctgagttctaatttgatcacactgtggtctgagagactgttatgatttcagttctttcacatttgatgaggagtgttttacttccaattatgtggttgattttagaataagtgccatgtggcactgagaagaatgtatattctgttgatttggggtggagagttctgttaggtctattaggtccacttgatccagagctgagttcaagtcctgaatatccttgttaatcttctgtctcattgatctgtctaatactgacattagggtgttaaagtctcccactattattgtgtgggagtctaagtctctttgtaggtctctaagagcttgtttgatgaatctgggtgctcctgtattgggtacatatatgtttagaatagttagctcttcttgttgaatttttccctttaccattacataatccccttctttgtcttttttgatctttgctggtttaaagtctattttatcagagactaggattgcaacccctggttttttttttgctttccatttgcttggtaaattttcttccatccctttattttgagcctacgtgtgtctttgcacatgagatgggtctcctgaatacaacacaccgatgggtcttgactctttatccaatctgccagtctgtgtcttttaattggggcatttaccccacttacatttaaggttaatattgttatgtatgaatttggttctgtcatcgtgctgctattttgttatttttcacactagttgatgcagtttcttcatagtgtcattggtctttatattttggtgtttttggtttttgtttttgttttgttttcttgaaacagattttcgctcttgtcacccaggctggtgtgcaaaggcacaatctcagctcactgcaacctcttcctcctgggttcaactgattctcctgcctcagcctcccgagtagctgggattacaggcatgcaccaccacacctggctattttttgtatttttagtagagacagggtttcgccatgttggccaggctgctctcaaaccctgaccttaggtgatccacccacctcagcctcccaaagtgctgggattacaggtgtgagccaccacacccaggctttttggtgtgtttttgcagtggctggtaccagtttttcctttccatatttagtgcttctttcaggagctcttgcagagcaggtatggtggtaaaaaaaatgcctcagcatttgcttgtctggaaatgattttatttctccttcgcttatgaagcttagtttggctggatatgaaattctagattgaaaattcttttctttaagattgttaaatagtggcccccaatctattctggcttgtagagtttctgctgagaggtcagctgttagtgggatgggcttccctttgtaggtgacctggcctttctctctggctgcccttaacagtttttccttcattttgcccttggagaatttaatggttatgtgtcttggggttgatcttctcataagatatcttaatggtattctctgtatttcctgaatttgcatgttggcctttcttgctaggttggggaagttctcctggatgatatcctgaagtgtgttttccagcgtgtttccattctccctatctcattctggtactccagtcaatcataggtttggtcttttgatgaagtcccgtatttcttggaggctttcttcattccttttctttctttttttctctagtcttgtctgcatgccttatttcagcaagatggtctttaaactctgatatcctttcttccacttgatcaatttggctattgacacttgtgtatgcttcacgaagttcttgtgcagtgtttttcagttccatctggtcatttatgttcctctctaaactggttatgctagttagcaattcctcaaaccttttatcaaggttcttagcttctttgcactgggttagaacatgctcctttagctcatcatagtttttattagctatcttctgatacttctgtcaattagttcatctgatcctccatccagttctgtgcccttgttggagagatgttgtgatcatttggaggagaagaggcactctgatcttttgggttttcagcattttttcattgattctttctcatctttgtgagtttgtctagtttcagtctttgaggctgctgatcgttggagggtttttgtgagggcttgttgttgttgttgatgatgatgatgttgttgttgttgctttctgcttgttttcctttcaatggtcaagtccctcttctgtagggctgctgcagtttgctgggaggttcacttcaggccctactcatccgattcactcccgtgcctggatatgtcattcaagaagtctggagaacagaaaaaatgggtgcctcctccttcttctgggacctctgacctcaaggggcaccaacctgatgccagtaggatcactcctatatagggtgtctgacaacccctgttggagggactcactcagttgggtggcatggggaacaggacctgttaaacgtgtaaaaggtatttttaaagcttagcttttttttttttttcaagaaaataactctgatagcactacagaggttgaactgaagtaaaccatctactgtgagcaaaccatttaggagtctatagcaaaacacaaagaagaattaatgagagcatgtacttggagttgagtacatgggagtcaagtcatgagtacatttgttgtagctgaaaacaattgagacaccagagaaagcaagaggagcaagggaagaaaaaaaatcagaaaaaaatatgagaagcaagggaaggaagactaagagtccctcttgggaaacatcagcatttaaggaatggaagaggaaaaatgagagaagaaatggttgggtaactaaaagagaaacccagagtgtggtgatctagcatccaagtatttcaaaaaagtaggaagtggacgagcatcaaatgctgcagaaataaaattaggtaaagcaatgaagaaacatcaattcctctgtttctctgttacaacattttaaagtctggattgtccctgtttgaaacatgttgaaatgagctccttaactgagtgagttaagaagtaagaggtgggcaaggctaagacccagagttaaagctggagtgtacactaacaaaagaaaggtggtggacaggaatgatgaagactaagagtgagtgtatgaccgagcacatggctttatgtgaagtcagaaagctgtataatgtaaagcagttagcaaggaaataaaatataaagagaagggaagaagaaagtcccaatattatcatttatctacaacaatgcagaaatatccttccagatacctcagccattgcctccatttggctcctgatccaaccacgaaaacaaacccattcttggtggctctcagagactatgcttggaaaatccagttgcttgttcaatgagtacaaaaaaatctatttaatggaaatatttattgatcacctaccatgtgtctggcattggtaccaggaagctaggctgtgttggtgggcaagacagatgccatgagctcttccttcatggagcttatggggtagtgaggaagatgtacattcaccaaagacttatacaaatatgtcactaagacagcagtacgtgccatgaggtagaagtgaagggatctattagagcattcagcaagggaacttcacccagcgagggagccaacatcaggagaatcccagcaaggtctgaatctgtacactttctggagacagagactttgtcttctcactcaaaatctaaatctgtagcctggggagccacctcttcttcctcagctttatcccaagcagtctctgtcgatcttatcattaaggacttttcttccccccatctctcagctggtttatttatttcactatttgctatttacactatttctgtttgattctctaccttctaagtggttcctcaaataaggcaaggttctctatctttcattggccttttaaaccctagtttcatctggtccaactatgttcaaaattatctctgggggaaaatatggggaaattggcctcttttgctacaatctgctaaaaaccttttctgtcagcaaagccagttgtaaattgccaaaaaggtgatgaattagttagaaatcattaacatttaatataaagtagctctcactctcaccttgaatttcaaaggtgagtgtgggtgatagactacagctgtgacacaaaattgcagctctagtttgggagtagtacagttttgatccaggagaaaggcctaaccaagaaatggcaaataagaggcaggaatggtgccactcctaaccccttgctcacagcagatatcagtaatccatttccatagtctctctcacaggcccagacacacctcaggagccttctcacgcagcatctgtcagccccggaatgaaatcttgttcctactgcagcaacatatggtcagtcctctgctagtctaaccaccaccactgtcctcttcactgcaggattggagattagcaactggaaaaaaaagccagcttcttggggatgtaccttgcaaatccaacaaagtacaccccaatcaacatgtcagctacaaccagcatcccaaagagcgggctcccttcaccagtacacatatgtgcacctctcaggtatgtgcacgctgagagaacacgtgagcgcagcggaaaagagcaatgcgggaaccatctcaaatacccaagtcatggcaggcaccaatgggcctgtccctcttgctcaaggcatgtgccagtggtctgtcctagtcccaggaatatccagaaaactgatggtgaacctggtcagaaataccagggaaatggtagaaatgaatgaatgactttatttcttggcattggctccagttgagacaccatgagaacacgcaatcaagctaacaagttgggcaaattgacaggagatgcacaagtgtgagtcccagatgtaaaagctgtgattctgaggcttgccaatcataaaaacccctgagtcaaaaagttaaaagctcaaaaggtataaggatagtggtcttcaatttttttctttaaatattaccctttacattgaagaaatataatatggacaaccactaaaaaataaaggatttctgtcacacattagagaagtttctcaatttattttttcatgtgatttacgacaaatgtgtgatctcacaagagcatagttctgaaggtaaaatatgtcataaattacaggaacatagagttccctaactcatactcagaaggaagtccactttcatgaagtaaagtataggactgtcagaccagatgacctggaatgatttgttttaatttaataaaagtaatgacatctttaatgaattttcacatctgcctaccattaattaagagcctgaatctaagaatgtagtatccaacacactgatgatgattctttccaatgatgagagaagaacatgcaaagttatcatctgaaatgtaaacagtatttttttaaaaaaaacaccggtatttgacagccctaaatatagcttccacagtattacatcagaaatccttggtgagcaataccagaaaacaaattcagaaaaaaaccagatgaaggccgggcgcagtggctcgcgcctataatcccagcactttgggaggccgaggcaggcagatcgcctgagctcaggagttcgagaccaccctgggtaacatggtgaaaccccgtctctactaaaatacaaaaagttagctgcgcatggtggtgcatgcctgtagtcccagctacttgggaggctaaggcacgagaatcacttgagtctgggaggcagaggttgcggtgacccgagatcgcaccactgcactccagcttgggctacagcgtgagacactgtctcaaacaaacaaacaaccagatgaaagtaagagagtgatgagaatctttgtgtgcatgaaagaaaagttacttaatacaaaaatatttagtggagctcaaaagcaaccttttgcttcctccaagggattctacagctgttgtggcatatggtgaacacctcccaaagtcagggtctcttcagaggccctgttttctttcccctaattgccccgtgcctatgaattagtagtttcttcataagccacacagacattatttttgtgtagatttattctccttttgactaaatccagacaaaagttaacaggacttttcagtatcattaaggcagggagagaaaaatgaaaggaaaaaaaatctgcaacttgcaaaatcaaagcattaagatttttcaaaaattaaataccatagctataatacttggagactaccatccatgaaggcactcaatttttcctcaaaaggtaatcttggtactaacagaaaaccaatgagagacagcttattcaaattagctctcttaaaatgccatgcaattatcaacatccatcattatttttcaagtagatacaaaaatgtattcagttactaattttcaaaaaaatcaatgttccttcctagccctggcctgaatcactgattctcaattttttctcaagccacccagaatgagatagaaatgaggcattcccacccacaagggatctaaaatagagtaagggtttgcctagatgggtgaaatctatatgggtggtcccaatgcagagcagtcctttgaccttccagtcatgtatctggatagctaacttctctggtctcaccttctcactccctgccaagttcggctgatgcagttcattcatactttctgtgcattctgtgcccctggcctagaacctcttcccaccttccgtgtctggcaagctcctgctcatccattctttggggtctggatccactctccctcctctgtcctaaatccctccctcctctgtaaagcctctctgaatgccaaaaggataacttcctcctcttttcaaattttccacaaagatagctaaaatctctcttgtatcatgttccaggtcctccaaatgtttgaaggtagctcatcctgatgtcaacaataaatctctcagcaaatttaatttgtgctcttgtcctgtccacagtagaatgaattcctcagtaaggctcaggcattcattataccctcctagttaatcaaagttcttattatgtctgggctctggcttcttttgtctagacataacagatccacttgctctaactctttttccaagaggagctccttccaaaatctgtgtggtcctccaacccacagtagcagcatcacctgaaaacttgttagatatgcaaattcttgagccccaacccaggcttactaaattagaaagtcagggtagagcccagtgatctgtgctctaacagccctccaggtgattctgatgcaactaaatcttgagaaccgctgatttaatttctcttcaagctattccaaggtacacattactcagaaaaatgccaactagggcaggcagggagggcaagtaatgatgcccttcccacatactctggcttctgcgagacccctctgggttgtattcattgcctccattgcagcacggggtgggttcagcctggggttcactatggctctctgacatctttgttgaaggccagccctccttcattttgcctttgcagatttagagagatttttcctccccaagtgagtttctttatatttaatcccatttgaattttctgtttatatgcattcacttttccaacttgcctagtacattctgcattttagtccattttccaagacacttgccaccccacttattttaatatcaatgacacatttaattagaagatgatttattccagaaactaaaacattattaacgatataccgcataacacacagaagatacctggggatcagtggcacagaaaaccaagaaagcctttacagtgtgctgttatttcagtctatttttggtgaatatattaaacaccctggcagtgccaaccagtaaaaacaaaccaagagagcaagcctgtgagagccagtaggacgtagaaagcttctcagacactgcatcctgtgctccatttgtcattctgtgtgtgggatggacatccggtcctcctcctctggaaaatccacagccacaggctcacatgagctgttccttttctcttctttcttgcagattctccatgctttcagcctatttacactgggctcacagctcaaaaaagggcaagaaagtgattatgtaaactcagacggagagaaactcaagctcctttaggcagtctactaacagtagggcgaataaatagaaaatacgatcatataaagaggatacaatactgagaagagtaagtttgggggtagtacagataactagaattaattatatcaagcaaagaacaatctgtaggcaactgcatctgagatgtgtccccaaactgcactaaaatcataacattatttttggataatcttctagccacctgagagtaccatgttttttttcaaacatggcattttaaatagggaactgcagacaataattcttaaaccagaaaaatatttgaaattttatattagggaaaagaaacacattgatagatcatgatgatctacactatggctgatcaacttgaaagtgtagctcaccatgatctatcagtttgaacatacctcatttgttcccacaattcccagctccctgctgtttccctgacctgtaactgctcatctccgatgatcgtggagttgagaggcagcggggcatagtggaaggagtgctggctcttgagtcagacttacatggattgaaagcttacttataccagctgtgtaatcccaagtaagtcatttcatcttttgaagtctctgtttcctcttctgtaatgatatcaccaatacctaaaaaggaggactattgccaggattttaaataatatacacaaaaacaggtaggaagcatccaataaacattactcacatatttggcctttcaaaaattaagacaatgtaataaaacatctgcctttatagaagcatctaagtttccctttccctccaggaaggaaaggaaagaaactttttcttctgcttctaattattccctaactccctgcattttcttttggtaaattattccaatttttgtgtccggttatgttttaatacttaaatgtctatttcttttgccaatagttatgcaatacaagtatatgtgatttttacagttaagtcagtgtccaaaacaacaacataattaaatcaaattaagtaacatattcctaatgctgcttatttaacatatattaaatttttatattgaacccgagagctgtttcataaagtagcttaaatctctgctttgccttttcttatttgatatattttaagcacaaaatttctaaagattaatacaccaaaaacattaaactaagaatcccagtgatgtagtgctatatttcatagtttacctgaaagaattacagttttagagatggaatttcatagaagtggtacttctgaagtcctgtttttctaaggaaagacgttatgaaggcgagaggtcagtatctgggctgattttgacatgtacagaaggctattctatctcagcttgcaaatgattctagaattaacagatacacatttacactggcaattggaatgaaacctatgggctccattgagatgccactgcttatataatcttcttgatccttgacaagtaagaaatttgaagaatttgtattggtttttctgaactgtttggttgaactctagaggtaagcagaaccccagtgtcctaaaataaatgattatttactttggaagaaaaatatctttcttagattcttagacatcttagattccttttgactctccttttgactgtatggacatggaacaagttcttaaaataattattttattttcatctgaaatttcttctcttgcctagaagccctagcttgctctagtgactcttaatttaagcaatattgcagtctagtaattttttctttattgtgttgtgtctgaggaagaaatatttaaattggtgtcttttccagttccttgatggttctttaccacacccagggccaataaaatattgatgcaatggtaaaaccgaagacaatctaatgattcagttactcaaaactgtaaaaagcttttgccaagtaacagtatttagaaggacaactcaatacgttatagggggtagattgacatgcaaatatccatcacactttattaagcaaattaaaaatagatttaatctttaatatgtgtccctacagtataaaatttactggattcaattgttgattatgtgctcagcagtttggctaattacctttggcagatgcttgatgcatattaatttgggatcccatgtcaattgtaactgtctttggtttgtaatctagcctctacttcgcatagctgagcaacaatacgggtgttcacttgaaatgcaacctcaggcaattctgtaggaggcacaaggtggtttcctgggaagatccctgcactatggggtgggagcctggattctcatgttcagcagccacataggctggttatttatgtcacataatcctgccaggcacatctgctgcataggaatgccatgtgagtaggggagccattattaattactaccacaggggaccagaaggggaaatagctccttaagcacatttctggagtagcccctaactaacagttgtttgaaggaaaaatattaatttgataaaaacactttagggaattaaaaagcatgatgatcctaaatgttagtgagattgtggagcaactggaattctcatacattgctggtgggaacataaaatggtacaaccactttggaaatcagtttgagaggttctaagaaagttaaacatgcatttatagtatgatccaatagttccactcctaggtatttacattagagaaacaaaaacacaagtagacacacagccttattcataaatgtttatataacacctttattcatcatagccccaaactggaaacaacccaaacacccaccaacagatgaattcatgaacaatataccatattcatataagatatggaagggaatactattcagcaattaaaaaaaactgaactaccaaggcatgcaacaaaatgaatgaatctcaaaaacagtatgccaagcaaaagtagccagatacaagaagagtacatattgtatgattccatttctggactcagacaaatgaatccagagtgacagaaatcagggtagtggctgtctagggcaggaagttgaggggaaattgatgacaaaggagaggagggaacattgtggaatgatgagaaggttctatatcttgattatcgtggtggtttcacgtgtgtacacatttgacaaaactcatcaaactctgtgtttaaaatgggtttattttattatgtgtaaattatatctcaataaagttgaatgaaaaaatgaacacacacacactgggaaagcagtgacaaatatgaagttgaaacaccccaggctggctcttaggtgctaacaaggtggtagtccttctcagactggtgcctgttttgggggtagctctcccaccaaagttgaggtcctgacctaattctactcacaggctgattcctttttacaaaagccttgctacacctctgtgagaatgacaatggatatgaaagcactttacaaaccaaaaagtgctacatccaatcaacaaagatggctaatgctgaggctccttgtctacctgcttggtgtcctggcctgcccttatggcagctttcccggagaagaaaaaaaaatgatggagagacatccttcctgggcctccaagtagacctagaacctgcaagcatttcccttccctctctcgtttctctcctcagctgagctcctctcacttctcagagcaacagtcctttgataacctgtagaggaatcatgaataaatggatataaagacagccttccttaacacacacacaatttttaaaattaaattaattcttccttgtggcatcataactaagagctcgggtcccagggtcagacttcgtgtgtccagagaccagctcctccgcacttgctggctgaacctataaaatcctttagcttctctgtgcctcagcttccctgtttgtgagagaggggtggaaatagtacccacaccacaggctgataggaaaattagtcaatgtccttaatacagtggccggcccagagtaagaaagtaacaactgagagctagaaatcctacgggatatttttgttctgactccccatcttctctctgaattttccttaggatatcagacagcattttatcaactccacagaaacccatccggactctagagtctgtaagaggaggaagttcccacacacactcagcctacattggaacttttctaaaaataccagtttacataggataaaatggtggggcacagccacacctttaagttttagtttcccaatctgagttgatggtgttatattttatctatacttacttgagaagcctgtcaagtgtgctgtaactgtatgaatagacagaaaggtccagccacatgccagggtcgagaaatgtagaaaattgggtgctctaacaagccaagtagggaattaataatatatttagaattactaataaaatgcctgtcaagcaagtggcaatatgtgctctacaaaaaaaaaaaaaaaatgactgcctgctgtgtagggtgcgcactcttcctgagaagtatatattcttggaaataaaatgattcactcccagataaaacttctgttccctggcatttttcccctaatttttcattcatttgtgtattttttttacatcccctcatgtagctccaccaaccctcccagacgtcagtgggtcaagcagcctcccaaggcaaccttctgcacctggctcacagccaagcatccatgtctcaaagtcccgtccggcaggcttcctcttcttcctcctcatcctcctcttcttcagctttgagcgtgggccagttagtcagcagtaagtatcctttctggctcggtttaaatcgtggtggccttcttgttgcctatttgcaatgtcttccttcttgtctctctctcactctctcttgctctctctttctctcaaccctgcacaggaatttcctggcactgctaggtcaatattgagatgaagtccgtccccaggaccagatggttccttagggaagcaggtccccaaagcacactccctgaattagtggctatcaaggaccgggttccatcttaagtagttgctgatgtgctgagtcagtcctgccacttcagaaggtagcaactgatcagctttcagggcatgagccacatagctcacaactgaaataaccaacaacaggcactcagctggcaggtcaagctgcttttatgtgtgtttgaagtcccctgccattctatttgtaggtgtcagaggaaataaaagagagcatgcctgtgggcgggtgggtgtgtgtgtacaataagccacctcaagtggcatgtgggggaagctgcatgggccggaatcagatgagaaatctctgaacaaccattcataaaataggataagcctgcaagtctgcctccctaaatagcctatatatatgtatatatagtttttagaatggtatttggccctagggatagatagtatatttatcacatgcaaataacagcatgttaagatggatgggacaatggtctgatttaatgtcagtcacgtttagtgcagtttttacttatatataaaactgcagaacatgtgcatagattgcaattcaccagggaccaaaaatccagtagctatgggtgcctgcataggcatctgtgccataaaatgaggacatgtgaggatctgtgtttggtcaagtgtcatgaatgacctgttatagcaggaacagtaggatcctcacatatcatggggcaattcttaaaacaaaatggatggttgccatgacctccccgacaagtaatcctcctcaaaaaagaaaaataattacatacatatatgtctatattcaattatactgataattaaggcaagaaagatgcttgtgggtggggaagaaaatggaatgaggcattatggaaagatgttaaaatgcccaggtaggccgggcacagtggctcatgcctgtaatcccagcactttgggaggacaaggcgggcagatcacctgaggtcaggagttcgacaccagcctgaccaatatgatgaaagccagtttctactaaaatacaaaaattagccgggcgtggtggcatgtgcctgtaatcccagctactcagggcgctgaaacagaagaaccacttgaacctgggaggcagaggttgcagtgagctgagatcgcaccattgcactccagcctgggcagcaagagcaaaactccatctcaaaaaaagaaaaaatgcccaggcacttcaccagactaacctggatgctgttgatcttaaagatgggtcaacaccagagtttcaggatacatatgcattttccatcaactgtattttaggttgtttagatatacaaccctctccagaaactctagtctgacttgcataaagttaaggataaagtgaatttaattatagccagatttcccctaattaaaaaaaaaaacttttcctcgggaagagtcaaactttgttacaattcaatattctgtataagtttctgcaaaatactccatttctaaatggcagcaaggtcataaatttaggataaactgttaagctttggtcctgaaagaaaaagaaccaaagttaagcatcttacagagaagaaataagttaaatatgaaaaagaagtacaaacaacctcctactaatacagtgtttcacacaaggtaaatagttaacatgtgtaagatggacagaaagatgaatgagtggatgggcagacagcagacagtcagatggatggaactgggttctctctagtcacttgtcacagctgggcagtgaaggattagcctttttcagaaatcaataacagagatactttaatgggccagatagaactttcattgcacagtagccagtgggacatataagttctaggtttatgatgagtgaaccatattacatatcctcggtatgaaatatatagacgtgggaaagagagactcttttaccacatgcaattgaagccggaaacttcaaacccatatgcagagactgaatgacaccaagctagctccacagttgtctctgcaggccaggagagtctaacagtaccactaggggtcgcactttgccctaaccccttgctggacttgagttgccacaaattttgagcatgttgtttagttaaatcccttctgtctcaaaagcaactacagaatgaatagtacatgaatcatatcactctggttccataatttgctatgatggctcacagaactcagaaatacatctacttgtttactataaaggatatgataaagaatacagatgaacagctagatgaagaggtacgcagggcaaggtctggaaggattccaaatgcaggagtttctgtccctgtagagttggagtgcaccactctcagaatgtggatgttttcaccaacttggaagctctccaaattccataccttagtgatttttgtggcagctgcatcatgtagacatgattgattattaactcaatctccagcccctcttctctccctaaaaatggaggtggggctaaaagcttcaagcttctaatcatagctttgtctttctgatgaccagccactatcatgaagctatccaggagcccctaagagtcacctcattagaacaaaagatgttcctatcatccaggacattccaaaggatttaggaactctgtgtcaagaagtggggtcaaagactaaatattagaacagaagatgctcctagcacccctatttgttaggaaattataagagtcttatgagctctgtgccaggaaccaaggatgaagaccagggatatatatatatatatatatatatatatatatatatatatatatatatatatatatatatatatatatatataaaataagatatatatatatcttattacatcacaatatcaccaaaactttggtcaaaaccatggccaatgactcctccacgtcgttgtcaaagactgtcatcctagtgttggctaacctgccatatgccagatgaactagaataggtggatcatacaaaagtcttgccaactacaagcaagagaatgctgggttaataccttagtaatgatacaagatgttcatatgcaaagaaagcacgtctgggctcagaattaccaaacatgcagattattagaaaatctgcacaatacttatttatagcacctacacaccttgccttgtgttaaaccttgctcagtctccataatcatcagaggtggatatggtttttataagcagggttttcagaaaatcagaagaaaagtcaaacaagtacttgacaaatgtcccaattaggtttaagatttacagtgcactgtttagaaataggtaggtttagggttttgatcacttgctggatttttttccagtatacattttctaaacacctaagctctatccttagacagcaaatgacttatagttagctccagaaaaaaaacaaaactataaagtgaacttaaagttgcatgctgatggcatatagcacagtgaaacccctgtttcacaatccatgccattttctacatcccaaagaggtcaccatattgcaaaaatactgttctcccaaattgcattgcaaactcccaaatggcttcctatttctcagaaatatgtggtaaatatgcccattatttgctgtgagaatagcactaaaaagcagacagctatttacataacatagttaattaattcatacctttggaagcttctttaaaggtgtatattactctcataacaatcccacaaatcaggaatcatagaaagatgatgttgatgcatggtgactattcaacccatttagcagcaccttacactgatgcccgggctaagagtgggaaggagctaaatttaaaaaaacaaacaaacagcaaaataaagcaaaactctgtctgactgatgcatcctgagcattcaattcagtatgtgcccagtgaccacgcaaccagattctacaaagcaggtttgttttcacacagtttgcatttagcacccataaaaatcttttttactttcagtccatgcatcccaggcttgattttggaaacatcatcattatgtttatgagtcactgccagttttcaatgccatgttagcctaagtccccaggccagttaattcctctataagttgatcaagtgtcagactcagggtggaccctggccatcattgctattactttctggccctgtctttaatatatcaggctcatgtaatctggagcaaacttctataaaagatgtcatttcctccaccctccatagaaacctgagattgggtttccctagagctggttaaaagtgctggatccaccttgtgagagatctgaggattttacctgaagttcccatcaaggtggccttcagattcatccttaaaatgaacccaacctccccagagccaggagaatagatgacagaaagccagattgaactatcccaggacagaatgtgaaattctgagctgagggagcattccagggaggactctatttatcacaatcacctcttatttccccttttcaagctgaaaagtatatattccttaaggaagggaaactcttctcccagtgaaacaacctcaagagtttaagacagaaactttgggattaaaaaaagagcattcgtcttttgatgaattcaaaacatcttacagacagcatctaatgaattctcccaaagtgtgaagacaagtcccacaggtagtaatcagggtaaagctaatgtttatctagaagtggaccccattttgaatgggaagacttttgtagtctcagaacccatggagcaaaacggtaacaataatattttgccatctgagttttctggataagaacactaatataaagaaatctgagtgttcacctctggcagtcaacaaattttgcagagagatgctactttgtccaatggaccatcaccctgtttaaatttcataagaatttctattttatcacggagctaagtagaaccaggagaaaatacaagagtggaaactgtcagaggaagaagaaggaattcagtttcctggtggaataactgtttcttgggggcctcatggaagatactgggctcagtagcccaggctcccatccctctgagctttaaagtgaaagtttgataatccacacaacagcatcaatgcacacagactaaaagtccacagcttccttttcaactcttgttattgtcagtgatctgacaaaaagcagcctgcacgatcacacatacggatttagttgatagactcaaggaactagtaaggacacataaacaatagagacggcagaggaagggaagaaagattagaggacacatttacataaaatgtcagcccaagtcattgggctgccgaatcctgtgccagtgtctggtggcaacacaggccttgggactggagtagaccatggaaacccttccagattaaagacctgcccctcacatactggttaatccaactgaatctcgctgatctagagatggggctaacaaaggcaaaaattttactttcccagcccgctgattcccagatcttggccacttgccataagtagtgacagtggggtaaggaaagggccagggtgggatgcctgctccggagcccctcctcaacagacctgtctggcccgtcagtcctatacaggtgagagagcaagttttctgtgtagtgaagcctgctgaataatggtaaaggatcagtaaagacaatggcacacagagtgcaccacacccagacttggtcaagccagggccacaaagaaagatttctttctgtagttgtcagcagatcccctgcatcagaatcgcttgtgttacttgttaaaaatgcacatccctgggcccaaagcagtgactcttatacctgccaaattaagaaaatcacagtcctaaaagtgatattgttacatggaacgtctccagctttccatcttttcagtttcaaacctccatgctcacacccttgcaagactgccaaacccttcttccctctctcagagaggccagacccctctctcactgtaccattctgtactctctgctctaaaccagagtttctcagctattattttattatcaccccactccccctgcaagcagcatttttaggtgttttgtttttatcttaattgccctccttcctccccaccccgcccccccataacattttaataccacagatatgttgcacatctgccctgttgatgtactatggccctttgggggaccacaccattgtactaagacttttcctgcctccccctcagaaccaatatcagcctcactggaaacgcatgctttaaacgcagggtcacaaaacgggctgagcagggagcaggttggaggctgggtggtgtgaacatgaggaggagctgaaggagcagccagaatcagttccagcccactggacattaccaagtgcaaatgtacatccggagcagccaaatcttctaacattcagaagagtttgggaaatgaagattttcctttagaaataaatgtttacatgttagcaagtgcttttttttttatgtaaacactaggaaagctgggttttatttgcacactgctcatttgcaacttttgctctagggatttctttcacggggaaaggaaaaaagggctcgagactgcgactgccgaagtgagctcccacaatccttagcgagcccggaagcagctccaggctgatgtgctcgtggggtttggaatccagagcacagcctccactagggacggcccgaacaaatctcattagccaagggttgcctgccttctgggagtagttttgggagaaaaaaacaggacttccattcatcttaacagtcaaaccaattttatagtcactgcccacccctgccccgcccgagctcatagattctcagtgtgctacactgaaatattcactactcctagcacgaactcctgcttcaccctaccaacctgacaggtccctacggtgccctgctcctccctgcatttctgcctgtgtgcacgctgtcaccactgaccagactatatggctccttcattctctgaaaactgcccattgggaagacctagatgaatcctccctcctctccactctcctgtctctgcacacccggtgtggatgtcataccattagttcttgattatactctgcctgacacttttctctaattgtttctaatgcattagcattggatgccaaccccctatagactgtaaactccatagaggctggaactgtttctgaggctggaactgcccctccctccattccagactcccagaagttacttttcaaaaataattagactgattgcagtagttgtaccactttccaatctttctacaacaaaattatgagtaatgacattctacaggacttttgtcgttgttgttttaatgtgaagataaaagacaatctatacctgttttgctgattctgttgacagagtccattttcctcaggctggagaagatccctccccagtaatgagaaaatctgtacatgaagctccaagctccccacagatattaacatctttatttaaaagtccttgaaaatgggcatttggcgtgcaaatgttctggttttgtgggttttgttttgttttgttttgttttgttttgttttgttttgtttcacgacaactagagtttccatagttctcagcccagaagagtaatatagtctgccacagtccttggacaagtactcaaatttactgaaattgatgggctattgcgcagaaaaaggaagagaaaaacttttcacctaagtccgaggaatgaggtgaagaacaatagagtcagctcacagggagaatggctttgctacaggcaggattgagtagcactttgaaatcttccaccatccccaacccatgctgtctccagcttggtgtacgctttcatttatccagggatcagtagccagggggggaaaagtttcattctccagctgttgtgtcatttcccttgataagtcctaaattgaccgcgttatcaggcaccaaaggagctttcctgtggtaggcattttttattatgtgccctttcaggggacaaaggcgtctgtgtcagtaaactgctatggggggaaaaagacaatatcattctcgcagtttcataagcatgctcttctgagggactaatgtgaatgtaagaaattaggcaacattatcatctgttagcctagctgttagcctgactgctttggcgatcagttgaaggaaaaatacaaaatactattgtcttcaagagcaatttttagcactaaatatgctaattaaaacatttcaaatggaaacctttccctttttatatttttgcacaatatttgaacatacttatgggcaaaatggagtcgcattcccatagcaagtgcctcccagtgctggctgttatttgttaagccctaaggaacatgctctggcattggggaagtggcagtgtgaacaagctgtggttttatctgggacagaaacatctcgaaggatgatttgtggaggtgtaatgagttgcggatggagtgttgggtgtctcacctgggagacaaagcgaacattctctgaggttggtttcctcactgctctgctgttaaagagagccactttcttataaaccgtaataaacagatattgctcggctgtgtgttgacgtattgatcctatttttaaaaacatctccacagatcctcaaacggcagcgggtgaggtggatggggttaatctggaggagatccgagaatttgccaaagcttttaaaatccggcgcctgtcccttggcctgacccagactcaggtgggacaggctctcagtgctacagagggccccgcgtacagccagtcggccatctgcaggtaacgcgcgcctgcatgctgtcacctcttctagccgccctgggcctcatttgtcctcgcggttcagcttttcttcgtcgggtgggcaaagctggaggggcagagagtgggaacaaagtttgggggcagctatatgttgggattggtgatcttgatgcaaacgacgctgctgaagcaaatttgggggtcctggcttgataactcctgtcaactcacaaagaacttccaaggcagtctcattggaaatacactaccccagggtcaggggccttcctcctgggcccacactcctatgcagctgagagccaccgactttgtctgcacgtaggtattctgagcaaatgttgtaaagctgccattcctaatttgtgttaacgcctttgctatttctgcccagagatggctatcaggattttccaagaaaacacacattttaaaaaaaaattaactatcttgtgaccttgaaggttttaacttgccttcccagacacagctttaaaagcacatttataagaaataaaaaataaaagaaaagaagcggtggctgctttaaatggctcagaaaagggtagtgagaatctggcctaaccttgctcatctcccccaaattaaataaatgaataacagaatccagccttggttgtgttcaagttgatccgggttaagtggtcagaagcaggccccgtgcatgcatgtgtgtgttgcactaatcccatgtttatgcatgaggtaacaaaggcacttcggtaagagctttttcctcttgggcaataccttatgagtcctcctccaacaggaaaagccaagaaaccaactctaaactcatttaagtggattttgttcttggtgatccatgaaatgctgtctttttatctgctctttatacttttaatgtattccccaaaggacggaagtgtacttttcctgcagtttaagactaaggttataaataacatcagtatggggtagtagcttgcagctcacattttgctcaatgatttcccataaaacccattgattgttgttaaatacaaaaagcaccataggatcctctcacttctatggcctcccctactgttttttcttataagatacctccctgtagaaaataacctttattcagtctatacaaggatactactgctgggaaatttgtttcaaggcttgtatatgttattccaaacaacatgtacagaagtgtcaacactaacaaacagcatccatgatatgaataccattgctccctgttgggaaacattaattttgtttcatcttgacagccttgggataaaggcagccacaggtttttaagttgttgccaattttctattggtgctaaattcctgttttgcttatttttagtcctaaaacgtgattttcttttattgatacaagtgctggctaatgtttaactcatacacttagcacttcttgggcattcccaataaagtatgttgatttctaaagtctacccccagagagaggtcaaaaaagctgtggctgaaatgtggagactttgggaatttctagtataatagaacatgtctgatgccttgacttttgggcctttctctagcttccagtatttcagtgagatcgttttaggagctatctaccaagaaaagaaagaaagaccgagatcttatattggaacaatttaagtgaattcaaagggtggtgaggaacctgctttggaggctgcacactcaggcatcgcttgtccctcatgagctgcagtgactcctaggagctgctttaaatccctccttatcagaggcacagagaaaaaagcattaccaatacactgatcagccctatcacaacctctgtcccctcgtgccttgacactgtaaagcctgttgtgacgctatcaaatatttaagctttggggattttatggcaaacgatggcaaaatgtggtatgtggcaaattagcacaacaatgagagcttttgaggagcttgccataaaggacaagttcattaaataacattaaatgatcagttcactctgtattgaaagtaaatgtactccttccgtccttgaccagtactggaagctgggtttttcaaaaataaacaaataacccttgagttctacatggaagggaatgctatggaaattgcattaaaatttggttctgtttgtgctgcttatcacattataagagatctaaaatgtgctgccaaaaataagattgtggcacataaagaaagcctatccttttctgtccttttgcaagcatccttacaaaacatattctgagtaacatgggctcagtttagctctatgagaacagaccattgaaataaaatacactctgtagtcagaagtttttcaacagcatgggacactgtaaaagggagaggagaattctgtgtatccaaagctgtcatactggagagttgtgaatttggatttagaataaacaaacaaacgaataaaaggaattcctactttttttgtacttcattgagagtgagtgtgagtttggtaccagggcgacttcttaaaacactctatataattttgtccaagacgcttcatattttttaaagtcaatgtagcaaagaattgctgatggcagttgatatatagaagacctcatttacagaaaatgatatcattcaagtacagtttgcagatatcacacattaaacacagcttggtgccctggtgcaaaagtacaccattacaccggctggtgtttggaaggcaggaggtggccttagtacacccagaggtggggtgttttatagtaattacaatgtgtccagctgtttgagccagaacaggaaagtagcaatgggtaatgttttacctggaaaaagggcatgttgttaacttacatacggtgaaaattgtttgttcccagggagagaaaaagagagagaagtcaaaatgagacacaaaagagagataaaaagagagccatataaaagtcccaatggccatcagtgactatgataatagcaataacatttttataaccaagtcaatgggggtaatttaaagaaaaccaaatgtaaaacacgtaaagaatcattttaaatgaaagaatgtgacaactgtcatctttgatgtcacttcttagcgttaatttttgccttcatgagtctgaggactgagaaatggagctggtactattcaaataaatgcttagatctcagagtttatagggaaaaggcctgtgagttgtttgcatgcctatgatatgttatgatagctcatgcatcctgctgtctctgcttctcatcacccctgtctgtgcacctgtgtggtttgcatggtctggcatggagcacgctgggagggtgggcgctggcttgggcagggctggctaccttgcagctggctattaacctgcagtaaattcgccctgccaggcagtcaggcaggcaggcaggaggcccaccctggcagaggactcagtgtaagactgttctttctcaattttcccccccagacacaccatcctgagaagccactttttcctaccacaggaagcccaagagaacactatagctagcagtctgacagccaaactgaaccctggccttttgtatcctgccaggtttgaaaagctggacatcacccctaaaagtgcccagaagatcaagccggtgcttgagcggtggatggctgaggctgaggcccgccatcgagcaggtatgcagaacctgaccgagtttatcgggagtgaaccatccaaaaagcgcaagcggcgcacctccttcacaccccaggcccttgagatcctcaatgcccactttgagaagaacacacacccttctgggcaggaaatgaccgaaattgctgagaagctgaactatgaccgagaagtagttagagtttggttctgcaataagaggcaagccctgaagaacacaattaaacgcttaaaacagcacgagccggccacggcagtccctttggagcccttaacagactctctggaagaaaactcctaaagagatgcccacccataatcagaagcaaaattcacagaaactaaactccacccttgggactccacaacaacaacaacaacaaaatttaatttaatttaaaaatagccccagtcgtcatcacccttgtaagtaaatgactaagaaaactaccaagtggacagaatggtttctacatgtccgttggttttccaaaaaggaaagaagaaaatttttagaaaatttttaaacaaggaatacaccacactgaaggtgtgtgtggtaggatagttcccttcccccacctgtctcccccaaagccagttttttaatggacttaaagcaaaccaaataaccacgtacttttttctgtatattatgaaaatgtgaacacattttaaggaaaaagaaaaaaaaaaactaaaccaaaaaccaacaacgaaggaacaaaaactttgatctgttcaaagcgaatacaagcctgccacctggaggaaggactgcaccccttcaggtactaagtgctgattcactatgaaacctattaaccaaagtcagaaacatggcattgcaacgcgatcgttcgtctacgcttctccgcacgtaaagttgtgttacgaatttttacatttgtactaacagaacaataggaagcctgatttctcccatctttcccatctactgtctccacccatggggtgggtaccattgttgaagccattctgtgaggctcactattgggtttttttgtgggggtggtagggagggtggtcttttttctttgtctttctttttgacgggagggcatcctggatcgtgtgccaaagcatttgttgcttttttctcactatgacttgtgggtttgagaaaagaaaatggagctcgcatttctctcttttcctccatttctccatctccctcgcgcgtggctcctggggtctgctggaaggccacagaagtggggagaagcagtgtcttttccactcagatcctagtgaaatgcaggagagactccaaaataactagggctttgctcgatgaactgtcaacactggcataagctgtaattgtgctcactgtccacaccagagcttgggatttttctcagtctgttggccacgtacatggagagctgaccaaaactaattttgtaatataaacataagctgcacatttggttcaatacttacatctatgttatgcttctgtgcaaagcaatttctctcagaagtctgatagccaaagaaatgtctcaagatttcagtcaaatacacacatgacatgcacacacccataaacacacacacaaagaaacaggctaaaaagaaagtgatagcaactggatcattaaaggccatcgtgtatcctgttaatctcatcttttctgctacttctttcattccaatagcgatggcagacttttttcagggggaataattactcttcgggatatataaatggagcagaaaggtggcgggcaaatttaaacaactggaattgggggccaggttcttcaggggaaaggaagtttgaagaagctttcaccaaaagaaaaaaatatagaaggggcttatctaacaatcagaatagcctgcaatatgagaactagaggattatttcctttaaaaa

SEQ ID NO: 474 - DNA, 293902 bp, Homo sapiens
  source 1..293902: mol_type = genomic DNA
tgagagctggctaggcctctctctccttatgttatcacctggagggactcatttggggcctcactcccaatgtctgggcactgtggttctctcccacgtggcctctactcactcactaatctagtctgacatttacagggtgactggcttccaagagtgaaaaagcaggtgctaggagacctccagagatctcagctcagaagtctcagaatgtcacttctgcattttattaaagcaagtcacaagccagaccagactcaaggggtggggaaacaaactccacctcttgatgggaaaaggaacacttgcatacagacataggaagcattgttggcagccattttgggagacaactgccacacctttcaagagctaatcacgacagaatgttagaagactcctccatcttccatggagaagaaatgtcccaatctcctggtatctaatccaaggatggattttttccattgttttccactactgagttggggagaaggaggcagcatcagcattagggtacaagtgaaggtgaatagagctgaggatgtttcacaataatagcattctaatatgactgtcttccattctgttcttcccaagcttccacttttagcttgcttttgtgaatcaagaccgtggatcattcaaaatagttttttctttttcttcttttttttttttttgagacagggtctccctctgtcccccaggctggagtgtagtggcacaatcacagctcactgcagccccaacctaggtgcaagtgatccttccacttcagcctcctgagtagctgggactataggcacagctatagtcatcaccacacctggctaatttttatagagatggggtcttggtatgttgcccatgctggtcttgaacgcttgggctcaagcaatcctccccgcttggcctcccaaagtgctgggattacaggcatgagccaccatgcctggtcatttaaaatattttgttggtattttatagattacttttaacttcctggattttagaactaagcagaattagcatgctctgatgccttatcccacctgtcacagtaactttcctctataagatggtacattttactaaccctttgtaagtacatacttaaaatgcttaagcgatgaagggaagtctggattcttactgtcttcagcaagattaggctctagccctctcacttaagaatacctcttgggagtaattcttttctctgaattattcatgtgtttactaatggtatccatggtaataatggtatccaaaggcatagttgaaatgtattagcctttactgttattcctgtgaaggcttatagtgttggcatccattccctctggatttcgagtctgtgttcacagttgataatctcacattgagccatgatactctttgtatcattatcattacctgatataaagaaaccagacagaccattacctgatacaaagaaacttcacagtgaattcatagaaaagacagaaaaaagttttgctgaatatgtcgtatatacatatatataatattttattttaaaatgtcattgaacatatacatttctttagctttttccaggggacattgcacctaagtttcaaaacacacaaaatagatcccctttactaaacagttttcattttggggttacaaaaaagtcaatgtttcacaatcacaaagcataaaggtacatggttctgaaacaatttccaggcagatttctctcattcactgtactagggtagttttggaaacccagaccatgatccattccttacaaatgatctccaccatgggcctccctgggtctccagaaaaaaaacaaagaaaactgggggcaaaacaggagtaaaataataacctcaggactcaggaaacaaacacaaaatacttgtgggagatcagaaaagtagaggacacaggttctccttcaagtacatcacagtagaaaactacagcacatttacagccttatttggtcactgtctacctggttgctacatgaacaaaacttcacctaagacacagaagaaaaattaaagctatttacacagataacactgtggattcgaaagagcagtcctctgcagaccggcactccatctgacaaaagccacagtgctcacagaagaggcaagtcagtctgctcgcgtagcgtcctttgaaaaatcccagtgtacaaacatgtgccacgtcaccacacaaaaccaaagtctgctcagagaggtgggctatggtgtgcaggctgcaacctttctctgcaattgttaagtcttcaaaaatctgagttcctcacataaaattctgtgctgtggccagagctcgttttaccattttcttagattggatcacttttaggatcagcttcgttgttctttgcgtagacaatgactctcacagctttctccaagtgtcccagaagcactaacttactgaaaatagaatctcatcaaagcttaacatattcactctgaaaacagcggagctgctgggtcgcttaaggaaagctgagaacctcaaacctgtggaaggaaaaccagtgaccacttgtggccttataaagttgattggcaggtgaggaaggggatctcaagaggagaatccgaatttcaaagacatgggagatttgtccctaatgttttcatactagtgctcttgttaaatggaaaacccttcctgaatggggaagatctgaggctaaatctggatcctgggactctcattcttgcccaccaccatctccctgtggctgtcattcttccctggaagtgaatgaatactgagaacacagtaagaggagggtggtcacagctgacttcacaaagcctcatggaggttaagttgttcaagaatttaaaaagtaaacaccccaaatcctccaaaatggaatactgtggaaaataactgaaatttccactgcttaaggcttcatcctattaagacagctgagtacttggcctggcccgattttcacctttccttttacacctcaagaacagcagataggtatgcataaccacagcagaacacaccctccacctctctgactgctgacactggctacaggaataaggctttggttatcatctagcaaaatgccacagagcatggacggactgagtttgttctaaggaaaggagtttcaccagatagtctgaagaggcccagcccagcaaagagatttagagcaggaaagcctttcattaaagtagccacacacccctcgagacaaccataaagacttgactaggaaatcaaaaggtttttattaaacaagacttcctctgaggctattcgagcaagcagatttggctataagtcagatacgcaagatttctgaaccatgtataaatacgttctgcagaatttcgaagtgtgcgtcctttgacttttccagggatgcaccaggggccaacccgttatgtagacacggttactgttttaggactgggtgacatggggcctgggtaaaaaaataaggccaaaactgagtaagctcaatttatagagcaatatcagtgctggacagatctgccatgcttcgtttacatcatgtttcctacttttgatttcttcatcttatttatagtcttcctcccatcccctgaacacaaacttgactttatcttctaactaagatctttccactcaagggggcgtaggaaaacaattcctggatgcctttctaactaaaaccagcaggactaagtgctcaagattttataatatttcgatttagaggtttctagagttattcctgagacgtgccatagcagtaaatgaattggtgaattgagtagaaggtagttgtgacatctacacccaaattcttactctggtggcttgaataaaactggagaagctcaaggtagggcccagatagaggcccaggaaagcaaataaatgaaagacggtggggacacaggaaggatcccaaagacggcagctcagggtcctccacggaagacttgctcaggtttcctacttacacatgactctgagtgccagggcagaacagggagtggaccacactgctgtcacatgcccgaaggttttcctacagcatcagactctgccacgaagcaaagcattttccacaaacttctctccatagagatatctggggtagctaagatctactgcaggaggaagaaacgtgctgcagatgaagacaactcctgacaaggccgaagtcccattcttcccaggccaacacttgcacaaacacctggtggcgtgaattcccacagtatttcacctgccagacggcactgtctccacaccctggaatgagttctttcctgagcaggaggggctccaggccttttcgaatacaataccgacaactccagaaatgcaggtgatttactgccctggaggagaggttcctatcctctcctctgggaagaaattcaaacaaatatgagaactggaattagctctctagcatgctgggggggtcacgtcagtgaccttttttcctttttgggtcagaagagtgttttaattactcaaagttgtcaaaatggtggcaatacctcagtagctcagcaggaagaagactaggtaattttgtggccgtacaagtctgcctaagagacagaagtgagttttataatctacttggccattcctcccagcagagaagcagcaggtagatatggcatgcactgtgcctgctgctgctgctcttgtggcgaacactcagatgtggaaccatagagggaccttgaggagctgggacatgattctttagagaagagaagagacagggagcacagcatgagaatggccagtcaacccatttcaaattcttttattaaagtgccccccgaggggccttgcacaaagatgatggggagagcagaactgctgctccttgacagaactctgatccttacactttgtttggagtgggcttggggacagtcacaagccatgaaacatgaatccaaaatggtccccagatgagccatggtgaaccaacagatgcaagcaacttcttaaactgctctattaaacactgctttatatgtgtccccatgatacagaaaagtgggatggggccagccattccagaaatgaaaatccagactctcacagagaacccttgagccacacaggaagaccactgaagacaacagaggaactactggtccacagaaacactcagtttcatgaaaacacactgattcggttagaaaatgcaacttgggaacaaacattacacaacaaagaccctctgtcatgcagggcactggcccggatgctgcctgggctgtgtgggctggaggaggtggggacaacccagcctgggtgggacttggacacagaacttccttagcagggtgttggaaagtcccaggcctgttctgtggaaggggaataaaaaacagattcaaggaatgtcaaaaacacgaaaaaaaaaaaaaaaaatccctgcctcactccaccactgccataaaagaatagaaacagagaagaaaaaaagagaaggggggcggggggcagacggcaatccctgaaataaacctcaggcttcctagaaggtgggcacttacttacattttgaggcatgaccccctactttccaatgcagcactttttaacccgtagataagctggcagcttgacaggctgaagagtcctctgccatttacacctgaaaatggctgccccagctactctagataaaataaatatgacatatataccccaaatagtcaatggccacctcggaggcctatgaaaggaactgaaatacaacaacacttggtagcagcctttgtgttttgctcttgttgagttgacctgttactaaagaagaaatggaaaccaaagggtcatcttgaagcatagtcttttggccatgaactccccgcttgggctgggaagagactgcatcacttggaactcagctggggcacttcccagttccgtcctgccaagaggcatcccagctttcttcccctctgtcctcccaatcccctgggccattttcatgacagcttgtttccatgtattaaaggaatgacatatacagaaatgtcgtctcctgagcccagtcggtcattagatatccgccatcctctgtccttcagcacaccccgggcacgcatcaccaggtcctgagctgccagtgtgtacctacacaggagaaccaggaacgagacagtcagtagagcatcagacagaagccagggtcaagtgaggctgggaagggggaggcatcactacagttgtataaataagtttcaaatacacttacaatacgaaaaagacaaggtcatcttttcccaaaatgtaggacacctaatgtgagattattgtttacatggtagtgggataaggcactaaatacattagataatgtcttacattattcacctcctcagtcctcttttgatgtttttgattgattacattgaggggagtctcagtttgctgctagtatagctcaaagagctgctcaagctcagagctttccatgacaaatggtatctagcttaaaaagtacatgggaaaaatcagaacttttgttttcaatatatttagttttagagttatattgcttttgtgacaaagaatagtcattttctatttatggtaaaaatcatttaaaataaattttttaaaaaagtgagttaaggaaaaatgttaaaaataatacaacctggcataagcatatagcaagaatgtgaagttttttggtttttttttttaatttatttaatttttttttttgtaaatgactgataagccttggtgtgagtgagctgcttacttgtcagcgtcaccctctcctcttgaccaatgtaagttcagcaagggatcccttaagaatttgaaaataagattgctgagatttaaactgtaagcttaaggagaaagaatgacactgtaagctgatgggaaagtattaacatctaggagaaagactaacttgggaagtgatttgggtgggtatgggcctgggttagccctgaggcataaaaaaatgagacaaaacattggcaggtgtctatccaaacactgaccagagcagagggagtcatagttgacagccttcaaaggaacttagttccactggcagggtcatatttggtgtgggatggactattttcttagtctataccattaagcatatgattcagctttattctgatttcgtgttcaccaaagaacctcctgattatgatctgcctccctgtgtaggcctgcctgcaggaaagaatgagctagtcgtttttactttaagaatatccatcagttatatttctttgcttaaatgtcaagtggcattttgctttacagatcaatcttgtgagcttggttaaggtgagaccaactctgataatgaatctcttttctgtatcttgattaaatcagtttctgaacctgaaaagctaagagccagactggtaaatcatcaagataataaatgtcaccgtataagtcctcttggaagccagcctgtgggccttttacaagggaccaccctgatattgctagtgacctttctctacttggaatgtttcagtagtctcgccttcagagctgtgagttatggaattcagaaccccagaagcctctccatttcttttgctaaaattcacagactttcatgttgagaactgcatcattgttacattatttaagaacaagtcctctaacaaatgatcccaggattgtgaagattccaagttgttcagtctttgaggatcaagtctatttgtacagcccagatagcagacagaagtgtaacatacactacagcagaaaggatattatagtcaatacaaaataaatacctttccttctagaggatggggtagtaggtgaataattttttctatctgtattgagagaattatcatctttgaggcagaaatctttaagttattcttgagggaagatgcaaacagttcgtcctgaggttctcctcctcttgagatcaggaaataaaggcctccaaagagatctttggctgaagagctaagtaaatatctgaaaatcgacatattgcagctcatacactatagtcagaaaagcctctcagctgctcacctcattctcacactgctatgaagaactacctgagactgggtaatttataagcaaaagaggtttaattgtctcacagttccgtatggctgggaaagtcttaggaaacttaaaatcatgccggatggtgaaggtgaagcgaggcatgtcttacatggcagcgggagacagtgagtgaaggggggaaatgccacacttttaaaccatcagatctcgtaagaactcactcactcactatcgtaagaacagcatgggggaactcggtccccatgatctaattgcctcccaccaggtccctctcctgacatgtagggattacaattcgacataagatttgggtggggacacagagccaaaccatatcaccccagcttactcttagttttatattaaattgtatatgagacataaacacatggggaaaggccaccagccacaccagagtgatgtttattatcctggtgattgatcagtctgcacctgagctttttaggttcagaaacctggctaagtttatttgcctatcaggcctgaacacaccttaacccaggtatgagctgactagacatagaaaattatggtatgctatgagaaaatatgcctgacaataaaagatactcaatccttttgtagttcataagcttgatgtttgagttttcacacttacgtgtgaaatgtgcctcccttaaaccttgttactacgtcagcacattacccatgagacatggaaaaagagatagacagacactcaaagatgtcaaaaaacagatacaggaactcaaaacacaactctttatggctattttaagctccaaacaggcctcaacaggtcctgcagtcatggagaaatgactggctttattagagtcatgaaagatgaacaagagaccaccctgatgctgctattactagtgactttgcatattttttaaatggtcaaaattagcttggtatttttaaaaagcaaggattaggtcacctagaaaagatggctacccaggaaactcatttccctgagggctgtaggtaattaaggtttcattcttcaatatggttatttcctattccaagataacttcctttgagattggttctctcttcaccatccactctgttttcccttaggtgcttaacttcctgagggaaaatccactcttgctttctcaatttattacttcccattttcttcctttgtctcttaccagtaggcccaatactctactaatctgtcctcttaaagcttgatccaagggtggcttctcaatacttattctgcttaaccctttgtgttcagcacaaatactgctgattattttatccttaaaaatctctgttcttgaattctcctttctttctggggctcccatgccataacccactccaagttctcctgtgactgggcttccatgacacacagcacaagtccttctctctgatgctccttcttaatttcctttgtaggccctaactaagacttaggaagaactcaatgatcattaatttctttttacttccaaagtggaacatccccagctatcatccttagttaatggtatcctggtctcttaggcaagaaatcatagtgtttttcaatgccactttcacaccctgatattgttcaattatgaaatccacagggcagtgtaggacttctaaactttgcattattattattcagagacagggcctcgctctgtcatccaggctggagtgcagtggcataatcatagctcactgtaaccttgaagtcttggggtcaagtgatcctctcacctcagcttcccaagtagctaggactaaggcatattccaccatgcccagctaataaactttgcattattttaagtgtattttattagtagcacatggctaattaaaacaaaatccatatagtcactaagatgataattttgtttattgcaaaaactggtagacctgtacctatattttgcagtcatatatacacacacatatgaaaacttattttgtgtttttaatttattatgtgcttctttccttctttcttgttttctgtcaggtggatagctttaatattcccctcccccaactggattggaagtgttatttctattatcagttatgttaaatttttagtatataagttaatcgtatttctgtcctcctgaaaataaaaggaccttagaatgccttctttcattttccatgttactgcctattattttaattcacctttttttgagcctgccttaatcattatcatttacaatctacacttacataaataaaccaacatactaacttctttgctttttatgaaactactccttgcttctggatttaatttccttccattgaattacatttttagtaatttttttaacaatggtctgtgagtggtaagctcacctagtctttggattaagaaaatctttatttttacctttgattttggctgatagctttattgttatgcaattctagattgtctgttattttccctcagcagtttgaagacattattctgcttacttctgacttctactctttttgagaagtctgtcttttatcattcctttataggtaaatggcttttgtcattgatagcttttcaagtttttgtgtttttgttgctgatatgaagtaccactaagacataacaaaaaggagctttttacttatcatggtaagaaattagttttactctttcaaactgaaaacttctgaaaaattctcagccatcaactttttggatattgcctctcctctattttgtagatattctccataaactcttattagatcttattttaccttgcagatttcaacttctctgcgatatctttcaattcactaactccctttagcagtttactatccatttagtgaattactttgtttcaatgacagtgtttcaccgttgtgaatttctctttggttcttgtccaaagaaccaaattgacctcttctgaccttatgattctatttgcacaagtttaactctcttctaaacttgttctgttacacccaggttttctttgagggcccggagggaaggctctattgtatttggttattctttttcatggtgagtgtgaagaagaataagtgcttcttcagaaggggttgttcacatgtgccctgggttatccaaagagatttaaaatttgcctttactgaggggcagtatggatttctgtagtgctagaacatgttcatttcagctttttggcttaggatccccataccacaggagtagtattgttagagtaggcagttaggtagacatgatcagggcaggggagggccctcccccaggaatgtctggcgaccatcaggtgatagtcaggccattgttaaaccctctaaaataacaattggtcacagctggcaccagggaaatgcagtctcccaatagaaaacacctggccaggtgcagtggcttacgcttgtaatcctagcactctgggaggtcaaggcgggtggattaactcgggcccaggagttagacaccagcctaggcaatgtggtgaatcctgtctctacaaaaaaatacaaaaattagctgggcacatgcctgtcgtcccagctactcgggaggctgaggtgggaagatctctagagcctgggaagcgaggctgtgccactgcactccaatctgggtgacagagagagactctttctcaaaaaaaaaaaaaaaaaaaaaaaagcaacacctgaagcaggtgatcagcctcctgataaggtctcaggagataggcgagtgggcacacgcactaggaggcaaaatggccgagtttaactatcatatggccttcctccagaaacactcaacagataagggaaaaacaaatgagcatgcgtacttcagtaagcacactgcatatgcagcccctcccaactgttggcaggccactgtgcatgcagacagcccaccccaagggaagaatcaggggagaagaaacgcaaatcatgccaatgtataaaaccccaagtcaaggccggacaaggcacttggatctctcaagttggccgcttggccgcttggtcctcttccaaatgtactttacttcccttcgttcctcctctaaaacttgcctcggtctctcactctgccttttgtccctgggctgaattctttcctccaaggcagcaagaactgagttgctgcagacctgtatggattcgccgctgctaaccatatgaggtttaacttcacacttttcctgtgtggtaaacctacccagccatttcctcctcctcataaaacctcagtcttgtcaggcagctgccctgatccatgtacccatgtgcttcagaagcgtaaggacagccccgcctgagggagaagtttagggaagattcctaggacctgttcttcctaccctgttcccaggaggtcggattccttcacacggcttctctccgccggcttctccagtgcatgtctatccctccttgtccaagagcagtgtgcgtggacaactgagccgttagatgctgcactccataggtgacagtacgaatgctctaggaccagcttcctgacattcccttcatgccacaggagaccagcattgcagtgaaactcagcaacagcattaggggaagatgaagtcactcgcaggagctttcctcatagattcattaactcaacacaaccccggggactcagctcttgggagaaggccttttgtgtcagctagctaccatattgggccaggctggtggccatttcagagctcatttgcatccatcttcggagccaccttgccatatgaaatgcatgaaatcctttgctaggctgctttatgtcaagactggggcaagaacaaacaaacaactttctctgaaggaaaagaactgcttctcctgcccccattgtattctccaatttctaccttacatcagggatccctgggttggtgacagtgaaagtgcttaaggtggtattaaaacaggaaggctttattggttttgttattgaggctgaacacaagggcatttaggtgccatcaaaggagaactgtagaaagtagtagaagaaaatttgagtcaaaacatacatactgtataagcataaaatatccaagagagcagccaagaagaatatggtacagctggagacagccaatgggtagtggattctgttacacaccaactgggactgtgtggcagccggagcccgatgcttctggaagctgtgtgtggagcagccctagtgccgtcactgaatgctgggccaggctgcattagacaactgcggaggagtttgaaatgcccactcctaatgaagagtctccccaggagacatgttttgaattttgagaacatttttcttctctagctgaagctttcaatatttatcagcaaagctctgctgaaagcaatggctgctgggcagggatcagacttggcaaactccacagggctcaggctctgagcgggagggagcagagaaaggacagcaggggaggcatggaaaacaaaaaggaagaggggctgaagagcgatgggaaggccaaagctcttttcataaccactgactcttaaagtcaggcggaaggaggccataaatcctcgattgtcctcttgtccttgcagattctgttgctgtccttagttcttttccttcctaatggaccagaaaagggctctgggtgtaagcgtggcttgcccaggttccaatcctggctttcccaccatccagatgggtggctctggaagaagtttttagcctcttggagcccctctttccttactcaataatagtgcagacctccaaggctcctgtaacagccatgtgatctttccataaagcattcagcacagtgcctggcacacaatcggaggtcaataagtgttagttatgttccttattagatattaaatgcctttctcctccccaggagttttgtcataagtcatctacgtcttatagtctgttttctgaatctttagcatctgaatcagcacaacagtgtcaaaaataagtcaatttcaggctgcaggctatcaccgtatcttaaagttcttaatagttcttgttgggtgggaacttcaatttgccatttggatggtacagacagggtcttataagagggtgagtagtggcaggaactggggaattaatggcttccaaatatttgcatataaaaggcaggctccatctgctgacacccgcagtaatacagtgtgaggggaacaggaggaggaatcccctttgcattctgagcaggcctcagaaatttaagaggtagaaaagctctcccagctttggaatgttggcaggggtctatggcagtggcgtcttggtgggtggagggtcaggggtggcttagaatagggaatggcctttgttgtgcccagaactaggcaactcatcctgggaagaggcacacatcttagattcactgctgagagctggtccacagatgccccttgtgtagctctggaaccgagttcttaagcaggtgaagctgctcatgccagcttctgtcccctgtcaggttatggggactccactcaggcagaataccctgagacaccagaataacgacaactgttgtctgcagtgctgtcactgggctcattgggagtttgtgtgctgccagcagacacaaagctgcagactggagggagttccccacccccatgagagagggtgagacgccctgccaggcctcatccacctctatgcaccctggccctggttccctggtttcttaggtggtaggtttttagttcaaattccaaacagtaacatttcaatacgagggggcataatagactatttccttctcaatcctccctgggaagccctgtaaaacatcctgatgtggccacacagctaaggggccacacagctctgccacataaacaccctaaacaggatgggacggtggttggctgtgtgctgttagaggctgccacagccaggacctcaggctgatttctgaattcccacagatctgagtgtgctaaacattgcaaaagagagaaaactgcagatttttatctagtcttcagacaccagatcaaacactcatgaatttgttcttaaaaccagtaattggtatggtgaaaagtggaggaaacccttcctttttgcatttaaggcatagtttttgaaaaccttatggcatgcaagaaattagttcagctaactcatggaaaggtttcataaaaagaacctttgtattttgcaaaaataaatttcatattagggtaatgcaaactagcatttaatacttgaattaacgcctgttgtcagtgttggtgttttactattaacctttcactgattaatctcttccttccaaggcacacagctatctgagccaaggagagcatggatgtgaagactgacaagtgtggacatcaggaaggcttctctcattagagacatactctgtagggtttatggtatactggttcttacagatttaatactgcataaatactgcataaaaagcccctcaagggtcatggcagggagacagagggtcattaaatccaggttacaaaaaaaaaaaaaaaaaaaatgaggtggggccaggcatgatggctcacacctgcaatcccagcactttgggaggccaaggcagaggcaggaggattgcttgagaccagcctgggtaacacggtgaattttttttttttttttttttttttttttttaagtaaaaaagaagtttccacagacagttttggggaaatgaagctctagagcaaagcctgcacagttttgcctgggcactgggaatgtgaatccatgtgcatttccaagtttggttagctattccctggccctagttcctcttggctttgcccactcccttccccttcagtaatagtaacaatttattcctttctgacaaaatggtaagcgtcttcttctctgagtgtttacatatttgcctccgttttgaatattcttcccaggagacccccccactgaacctccagccttacagaggggacagtcagttgcagatattttgcatcagaaaaccctttccaggtttgagtgccttctccaaatcatgtaggatctttagggcttaaaagagaaccttactggaattataaggaaccagaggactgtgcagcccaacctccattacctgcagcaaccccactccaggatgttagcgcaatgcatttcctaggaacagttcatttcgtgaccccacaagagtaaaagaactgccagcttccctacaattcagggcaaactgtgatagaaaagaaagaaagaaagaggggccatctcctccttggcatcagggccaacttcagactccttgtggagcccaagattgtcaaaaaaagaaccaagaagttcatccagcaccagtctgaccaatatgtcaaaattaagcgtaactggcagaaacccagaggtactgacaacagggctcatagaaggttcaaaggctagatcttgatgcccaacattggttatgggagcaacagaaaaacagcacatgctgcccagtggcttccggaagttcctgatccacagcgtcaaggagccggaagtgctgctgccatgcaacaaatcttactgtgctgagatcattcacaatgtttcctccaagaactgcaaagccgttgtggaaagagctgcccagctggccatcagagtcaccaaccccaatgccaggctgtgcagcgaagaaaatgggtagacagctcatgtgcacattgtgttctaaaaaaccgtaaaaactgcaaaaaaaaaaaaaaaaaaaaaagagaaaaacttactgcactcatattctggctcatccataaagccgccttttaattttctggttcctttgttgagacagttcaaaagagcaaaaggacttaagatacaccagggtcagaaagatcatacagctcatttttactcccatctctgcctgagaggatggtgtgagggtcagaacacatctttatgctaatcacctcttccctcacagcacattctggagggggagatgctattttaaattccttgctgggaaggatgtcaacagaggaagacaatgctggcaatttgtttagaatggctgtcactaggaggtaaaagaaaaacaaaaagaaaaggaacctacaggcaacataaacaaaagcccaacaatcaaacgacaaaagcccctagtcttgcctgtctcaggcctcattccctgcctctttttgtcctgcttcctttctagacaaaactgggagatcctggtaagactcaaagtaaaacaggcccactcaaaacctcagatgcagaagcaccttacccttctcaccggctttgttccattccccttccctcaggcttcccaccctggggagaacttttcccttctcattttgtgtccaacaataggctgacctcctttggtcagttccctcaggcttgaacccagcaactctccactgaaaattaaacaggcaaacgtgtagtcccaggctacatatggagaaataggaactctctggccaaggaagggctaatagagcctctggaattatagtgggcctttcctcatcacagaaattatgacttggcaacttctactcatatttccatttggcatgacaagattagaacagctcccagctgggagggcactggctcttgggactgagctctctttgtccatgagcctcccaaggagacatcctaaactggtgtgtgagtgtggtgccctcctaccaaattacacacaggtatgtacaaagatggcaaacacatgaaagagaacactgtttcacatattcctaaattatgagtttgacaacagaaatagaaaaaacaaccctaaaatttgtatgaaactacaaaagacccagaacagccatagcaaacctgaacagaaagaacaaagctggagacatcacacttcctgactttaaaatatactacaaagctatattaacccaaatagcatggtactggcataaaaacagacacatagaccaatgggacagaatagagaacctggaagtaaatccatgcatttacagccaactcatgttcaacaaaggtgccaagaacatacattggggaaaggacagtctcttcaataaatggtgctgggaaaattggatatccacatgcagaaaaaggaaaccagagccctgtctctcaccatatacaaaaatcaaataataaaaacaaattaaagacttaaatataagacctgaaactacgaaactactagaagaaaacactggagaaatgctttaggacattggtctgagcaaaggtttcttggctaagacctaaattgtcagtctgaaacaaattaagtttctctgatgtcccaatattgtgtaattacttaaaggaacacacaggggtaggaaaacaatcctcatcttgtttctcaccatcagattttgcagaatgcttcctggttgtgaatcataatgaacaaattacataaattccatatcgttaccacagacttcctttaacacaaataattttcacgttcatgatctcatgagatcatgggcccctgctgacccctcacacctcatctgttgacattctgctccccacctccaagaccagtcagccacactgactgttgggtcccagaatgtgccatgttttttctccccaactcccctgacccttgcctcgctcctgtttattcttcaggtttaagtgtagacatcctttgctttaggttaatgctgctgtaatccctccagactgtaaactcaaagagggcagagctgaggtgtgtgttcttcacgagtatctagcaggccttggctcacaaaataataggtccttagtggtatttcccaaatgaacaaatcagaatgggagttatttgttaagaagaaaaccttgactcttcagttccttttcttttttattttttgagacagggtctcgctctgttgcccaggctggagtgcagtggcaccatctcggctcactgcaacctcgacttgccagcttcaagagattctcgtgcctcagcctcccgaatagctgggattacaggtgccaccatgcccagctaatttttgtatttttagtatagacggggtttcgccatattggccaggctggtcttgaactcttggcctcaagggatccgcctgccttggcttcccaaaatgctgggattacaggtgtgggccactgcacctaggccagttctgtctgttaaaacactttttttttccttatttttagagaggaagtcttgctgtgttgtccaggctggtcttgaactcaagcttaagccatcttcctgcttcagcctatggagtcgctcagattataggcacatgccactgcacctgtctttacaaccataattgtctaatctgcagactgatagtctatttcttgctgataaactgtgttccccttgcaattttccctttcattcattcatccatctgatataggattctttctattgctttggtttgccatcttccccgaaaggcatacagaaaacattttttctttcccatcctgtttgttccaaagagatccttgtgaaccctgcctccgtaggcagcagttctcgtggaccccaggagcctgctctgacctggcatgtgcacgctgcccacaggttaccactccttggcatacagatttatcactctggaggaaggctggtaagcaagaccaagccagcttagacacagaaaaaaagtgctgagtgccttttaatgcataactggcaggtggctttgcaaagctttataaaaataatcatagtagagaaaaatcaacatgagaatgttgctaacaagtgggatacataacatgaaacttgaaaggcgaaaaacacattcaaattcaaataaaagaatatttaattatagtgccatcaattcctccacacctgagctgaattatatcagacaattcgaggaggagacagatggtctaccttcacgtttcctgaatttctgttgtgaaatatgtgagacataacaacacacacatctattagtgcttattatctattaggcacttcacctaataatatatatgcatgaggttaatactgttggaatctccattttacatatgaacaatcagagaagagttaagaaattttcccaagatcctaaatctagaaggggaagagccaaaattcaactcgggaagtaattatagattacaggctcttaaccacgagactaccctgcctctcatataccatttatagtttaaaaataacacaaacaacaatgtacctgccatctacttgaaggaacagaatattatcagtaaatatcttagaaacccaacaggcctcaagcatatattccccttggtatctgcctcttctcctctcaaagtaaccattatcttgaattttgggccaattttcttggtttttgttatagttttaatgtctatatccctaaacaatatattggtagttttcacttcatgtacatagaattctaatgtatgtattcctctatggcttattaaactcaacattatgtttttgagattcttccctgttaatgagcacagctttggctcattttgggggtgggggaggtgctataaagtatcccaatatttgtttacccgtcccaccactggacacgcaagttacttccagtttctgtaataaaaacaattctgtgaatatcttcttgcatgaacgacgatgcaagagttcttctaggagagtcggttcttgaattttagcagcatcagaatcacctgcatggtttgttaaaacacaaatggttggtcctaccattggagtttttatttcaggtggggcctgaaaatctgcaattctcttttaaaaaaaaaaatttataaaatatatatgtaaaggtagagacagggtctcactatgttgcccaggctggtcttgaactcccaggttcaggtgatcctcctgcttcagcctcccaaagggttaggattataggcatgacccaccatgccagccaaaatttgcatttctaacaagttcccaggtgctgctgatgccatgtagctcaaaggaccgtgcttttcagaaccaccactccagggtacagacctaagagtagaactgctgggctccataaaaacaccattggtattatggttataattgtactgattctatggatcaatttaggtaggcagcttcactttggctccttagagcctttaagttgtaagaattcttgccgggcgcagtggctcatgcctgtaatcccagcactttgggaggccgaggtgggcgcatcacctgaggttgggagctcgagaccagcctgaccaacatggagaaaccccatctctactaaaaatacaaaattagctgggcgtggtggcacatgcctgtaatcccagctactagggaggctgaggcaggagaattgcttgaacctggcaggcggaggttgcggtgagctgagatttgcgccattgcactccagcctgggcaacaagagcgaaactccatctcaaaaaaaaaaaaaaaaattattctgtgtacatttatgcgaagaatatagaccgaactagccaagtaacacaagtcagcccttagggcctcactcagaaatatctttctctgtggttaagggtatctttcttttcttctctgtttccagaaatcaggatcttgtggccagaggttccctgtgacacagggggacatttggataaagttagctcatggcatagagggataatagtcatttctggcaggtcagaggtgaatggagtcttcatctatgcttagtttattaaattagaaaaaaaggctaaaatttcagcctttacagttttgatatgtattattattcaggcccaggtactttctaattttcattataattttttcctttgattcataagttgtttagaagtttggtttctattccatgtgagtttcctctcctttactagtttagaagttaccctttctattattttaacagttttcttagctatttcaacttgtttacttaaagcctaaagttaaacaccattaacttctcaaaagaagcatagcatgtgagctaacacccctcccttgacaatttgtacgctatttttatgcaatattttagttctatcatttttaacccacacattagacattcttattactgttttatatagtcaaggtatatttaaatatgaccacatgtttactaataccttagcttaataatccattttacttctcagatatttcctgtgggatcatttccttttcttacctgagcacaccctgtagaaatttcttcagaagaggttagttggcggtaatatgtatcagtttatgttttgcctgaaaatttgtttacttcatccttgttattgatagttttgctacatctaaaattcctagattgacagttatttttttcttagccagctgaagatataatcccaccattggcaccgtttacttttgaaagttggctgtcagtctgaatgtcttctttttttttttttttcctggctgcttttaatatatttttggaaggcaaaggggttaaagttcttcagtttctttctcttttttttgggacagagtctcactctttcacccaggctggagtgcagtggcgtgatctcaactcactgcaacttccgcctcccaggttcaaacaattctcatgcctcagcctcttgagtagctggaattacacacatgcatcaccatgcctggctaatttttgtatttttagtagagatgggagtttcgccatgttggctaggctggtcttgaactcctgacctcaggtgatctgcccgcctccacctcccaaagtgctgggattacagggatgagccacagcactcggcttttcttcggtttcactattttatttctccttccagagatttgtcaggctttctgaatcttaggtttagtattgacaaaaaattctggaacttcttcccatcttctatagtttatccttttggaattcttttagagcaccttaggccatctttttagtctcttaatctcatttcacattgtcttttctctttgtctaagccatctactggattatttattagatcaattttctagttcaccagtgttctcttcaactagctctaatctgtttaattcagtgaatttttaattcctatttttaaatttatcatctctagaattccattttcttaaaaattgtttagtcatttttttagtctcttttaagactcctattttaaatgctttaaatttttttgtttgttttgagacggagtcttgctctgctgcccaggctggagtgcagtggtgtgatcgatcttggctcactgcaaccactgcctcctgggctcaagcaatcccacctcagccccctgagtagttggaaccacaggcatgcaccaccatgctcagctaatttttgtaaagatggggtttcaccatgtttcccaggcttgtcttaaactcctgtggctcaagtgatcctcctgcgttatctcccaaagtgttgggattacaggtgtgagccaccatgcttggctaaaaaaaaatttctgaagcatgttaaaatattttatattattgttggctttcttttgtttgtgttttgagaccgagtcttcctctgtcacccaggctggagtgcagtggcgcgatcttggctcactgcaacctctgtctccggggttcaagcgattctcatgccttagcctctcaagcagctgagactacaggtatgcatcactatgcccagctaaaaatatttatatttttgactgctaaatccaataaagaagtatttacaggtccaattctgatgcctctgttattcctgctggcttttactcatggtgacttgtgttctagataaagctgcctttctcgagaggtagtttctgtttatttctgagagtcttctaaggatatttaggttatttacactgctgctagactgtaagaaatacttaacttggatctttctcttcttaccaagtatttctcaaaagaaacaattctccaatggatgactatcagtgctggggtgcatttgccatcactctcatcaacaggatcagaaatgggattatttctactttagaggatagcttagaggaagtaaaaatgtgagaaaggtatgccgctgaaatgcctaaacaaacactcaaattctttaccacttgtatctacgttcaacttaagggggatttttatttggcagagaaagtacctctttttttttgttttgtgacagagggtcgctctgtcacccaggctagagtgcagtggtgcagtctcagctcactgcaacctctacctcccaggttcaagcaattctcctgcctctgcctcccgagtaactgggattacaggtgcccaccaccatgcccagctaatttttgtatttttagtagagacagggtttcaccatgttggccaggctggtctagaactcctgacctcatgattcacccgccttggccccccaaagtgctgggattataggcatgagacgccacacctggctggaaagtacctcttacaagaaaggtaatcccttctgcagtttggttactgtaccgtccatatcagcctctaagtcatgaattatgaaaattgcatgattattaatttcaggcatgtcatggaagaatgcttgaggaacaaccctacaattgtagaaatgcacaaacctgtgaggatcatctggatcacagttaggaagaaactgagtgattgcttctgctacttcttcatttgataaaacgtcccagagtccatcagtggccaagatcagcacatcatctgatccatgatcatattttgaaagatcgtagattcttacctgaaaaaaaacaagaatactaccacttaagaaattggaagcatattattctccctaacaaactgacttctgattccccttcccttttcctgcccagcctagtggttttcagatatgcattgtagggtacttgattatacagcgagctgtgtggccagggatagtctcccttggagacttgctatatagacacatggggcctaatacacatttgtgaatgagcctaagcggtgggcttagtaattgacatagaagaaattaattgaaaatgtaatgtctgaggtatagtcagaatgatgatttataagtggattttatgctagccagaagatcagcagtgagcttgtttgctgtcttcctttgcgtattcattcagcaaacatttattaagggcctaccctgtgccaagtgctataaatgcaaagttaaatatctgatttttctgcttcagaggaggtctcagtctgtgggggagataaaaccaattcaggattcttagtagctgctctacatgtatttgtctaggagtaacgagacattctatttaatgcactcacttgaaacctttcttgcattacctgctctgaggcccaagcagccaactcctctcacataaggatgggggctctgacactaccttcatgtttcaggagcctcaactgaggctcacagaagatacacgctcactctgaacctccaaagtatgtctttgtcttgacagacttaagtctttcctcatgtctagtaccttaaatgacttggatatttcaacacccacctaagctctggaaagagaatgaggcagcctaggcaaaactagtaagaataaaaatcaagcctctcttgggctaggccacaattctatgtccatcctacttcaatgtgggaggggagggatagggaggtgtggagagggatttggggtttcactgctcttccctcctaatttggcagaatcaatccctgcctattataccatctcatgaactgagaagaaaagcaagtcaatttaatcaatccccttcagcctcccttattactctattttctgtctttctaattgagacggagtctctcactgtgttgcccaggctggagtacagtggcgtgatctcagctcactgcaaccttcgcctccagggttcaagcgattctcccgcttcagcctcccaagtagctgggattacaggtgcatgccactacacccagctaatttttgtatctttagtagagatggggttttaccagctgggtcccagctggtctggaacccctggcttcaagggatccgcctgcttcagcctcccaaagtgctggggttacaggcatgagccaccatgcccagcccattcctgttattttctaaatgcaagtctgagtgaaagcgatgggtcagggcacatgtcctatggcacagccattgttatgtcacctcagatctagagacaatcatatcacctcagcctagagactaaatctgtttaggtctttgaaagccaagcctcctatgttttagaaaggtttgtccaggctagtgatgccctggcatggggctggtcctgtgggctgacagtctattcccagcagcagaacacaacaaaatgtttacccacagggccctgggtgaatgagctcaaatgaaaagcagccaccaggcgccaggcctttgtggcctgtgaacaagaaggtaacaattagctaatggcccagcacatgagctgcgctcaagggaggaacactcaggagtacactgcactggtgtttaacatcttctttccaaaaggcatgctcacttaaggctaaacttatgttccggagagggcactcagccttttaagccaaattaaagaaaacatgaaagcctcagtttccggcagaccagaaagtcccaaatgtcagaattctgtcctcaggtcactgacgaatgtggtccaattttcactgtatcagaaacaagcaaccctcctatgctttattttccatggttcttcggtgtgttagagcagagcttctcaaatattaatgtgcacagaagtcagctagggatcctgctaaaatccagattacaattcagttccgggtgggcttgagagctgtggttcaacttcctcccaggtgatgccaatgctgcaggttcacagaccgggccccgagtagcaaggccagagaggattcctactgggccagatttgtacacaagggaatcaacgtctcagtggactttatgatgactgtggagactgttccttagagtgggctgttgacagactgtaaatgtcacccctgggctcctagcttcaagtactggttcactgtgttgttactttcagtatacaataactttgagagacactgctaataggaggccaaggcagggggatcacttgaggccaggagttcgtgaccagcctgggcaacatagtgagatcctatctctacaaaaattaaagaaaacaatgagaccctgggcatggcagtgcatgcctgtcatcccagctacttgggaggctgaggcaggagaattgcttgaacccaggattttgaggctgtggtgagccatgactgtgccattacactccagcctgggtgacagtgagacccagtctttaaaaaaaaaatagtgtttagaggattgattcctttttttttttttttttttttttttgagacggagttttgctcttgttgcccaggctggagtgcaatggcatgatctcagctcactgcaacctctgcctcccaggttgaagcgattctcctgcttcagcctccctagtagctgggattacaggcatgtgccaccacgcccggctaattttgtatttttagtagagacagggattctccatgctggtcaggctggtctcgaactcccgacctcaggtgatccacccacctcggcctcccaaagtactgggattacaggcatgagccaccgcgcctggccgattcctagcttcttattgggttatacctacaataaatttttgggataatttgaactctttatgatagacaatattgagtcataagaggtggtgagatgtggatgtctcaatcttatgcttgcagttaaacaggagattccatttgccttgcagcttcttctaaaagagagggttcaggtctgcagataacatccatttaatttcagagtctgccctatgagtagggtgccaaaccctctttaaagtgcttcctgctgacccaagaaatgtgacaggttgtgttattcaagctgaagttgtcttgtccacactcaaatggaaatctggccaacagaatgggtgtgggttgatacatacacacgttataaaatgctactcttcaattccatcaataaatgtaatctttccctaattctaccgttcccatttctatgctcggctccctaatgtagtttaattagccaacatgaaaatccttctcaagaccgttcttcatgtaatttgtatgaaaataataaaaagctggtcacaaccctggtctgtgaagcactccccaattaacatcttttgaggtttttacaaccaccctctgtttcctgccctttagccaatttccaaaaatctttgctaactttccacttacaactcgtgtcctatacattaacctgtgatgcagaacattttgcaaaaatgttttcagaagaattggactgccgcgcaagtcatcccactgtgtgcttatcctccccagcagcaaaggcttcaaaggattccactgggctccggagtcctgaccttccctccctgaagctgttgttggccttactcaatcgaaccatacccacatcctcaaagttcccctgttcaattccttaaatagcttcttaatgttcctggaagcctcacatcaaactaatgggctctgaagctccccaggactcagacatctggaagagtctttgcagccctggaggggacaggtgtgctacagaaacggctttgaagtgggactgggggacatggtcagaccttctaatggctccttcccgggttcccatccaccaagaaagggagaaaaaagccagacgaatccttgagattcttgcagtttttcagaacaatataatctgagcagctaaaaaatgggacctgtgtggacctgcctttctgctgccttcagtacgcttttattgcatacttgctgtgtgccaactcgttttccaggcactggggacacagtgactaaaactgacaaagcctctcacaacttctaaactagtagatgagatagacacccaaataaattacaatgtcagaagatgaaagatgctctgaagaaaaatccagcatggtaaggagaacaatagagtcattttagaagatgaggtcatggtggacctctctgggaaggtaccatctgagcgagtcaatttcccatgggtcccttcttgcacctccccaaccttcttttggattcctgttactcagtgttagactggtggtgaagaagggagggctgagaaaggtgggtgtcactctctcctgccaaagcaaccctaaggaggaccaaagagaagccatctttcttttccctggtcctctgcaggcacaatcctttcacacccactaatataagatttacctatatgctttactgtgggtaaatctttgtctgtcagttttgtgtgaaactgtaatcatcgatttatggccctgtcctgacactagactgtaaacaccatgagggttggcattgtttttttctgctttgtatcttcaatgcccaacttaacacctggttcactgaatgaataatcgtcgaaactgattgttccacagagatgaagctttgtgccttgtcctttaggtacagagagtgatacacagcatctgatctaccctggaagactctcaaggctgatcctgtctcagcagaatctgaacctggaatatggcagaatactattgcttttgcgagagcaaccaggtgaagaacaaaaagtgaatgtgttccatcccctcatgaggcttctgaagctttccttatgatctgatcacaacaaaggagacaggcaactgacaaacagcacactggccctgaaacaccgctggcatctttgttatcagcctttcagggcccacttttctgtctcttctaaaagactagatattctcaaacctaaatgtgtttagaatcacttggagtgctaccttaaccaagttaagattcaaagatcctacctgtaagagtcttgattgtacagatctgagctgcatacttcaacaggaccccagggaattctgatgcaagtggtggggggaatctcaccttgaaaaactgtaacagacgatcaactcctttagggataaggtccatcttatcctatctgtttttgtacccagaacagagcactgtgcctagcactcaattcacaaccgaagaaagcatttccttattgggtattttacccctgtccagcttacaatgaacacccagggggttggtcatcttattgtcccaccaaaattcaacttctgaaggcccagaaatcccaatttgtatttcctctgtgggtctagcagcatcttctatagtgtaaaccacagtaggtcttcaggacatacttgctgaggcaaagcataaacaggggaaggagagtggaagaaacaaattaaacatacaagatactttcagaagaccccctcatttcacggtgatccaacagatttagtttgttaactgagacacttccaaatcgtcaaacaaatgtaatgtgctgatatataacagaagtggcaaactctttccttttcttcctttgttttcagtggagctgccaataaacattcagtgtgggggagcaggaataagtctgggggcaaacaagaaccttgactaatgtgctctgaatgagccaagtgctgactgctctcacagagccctcagcttcagagcacttagagatgtccttaatgtcaacattgggcacttattttacacaggagcctgtgacaagcaactctttaatacagcacctccacttagtgctcggctgcaggctgctgtttcagcgtttgtgtaatacttgctcccatctttgccttattactgatgatattttggtggcatgttaggagggctcatacacctataagctgactctggcttcttaaagctacttttaaaaagaatccatcaattcttccatttgccaaatctctgccgcttctctaggatgccctcacagcttttgtgtcttgatcagttcagcagattctccaaactggtttttcccttttaagtactcaatgtaggacaatgagctcctgcagctcaggactggctttgtggaagagaaagaggcttgcccttgttatcagaagccttgcttcaggtctctgcttctaacaagctttgtgacttgagaagagccactcttttttttttttttttttttttttttttgagacagggtcttgctgtgtcgcgcaggctggagtgctgtggcacaattctggctcactgcagcctcaacctgccacactcaagcaaccctcccatctcagcctttcaagtagctgggactacaggtgcacaccacctatacttttttactttttgtagagacgagtttcatcatgtttctcaggctgatctcaaactcctgagctcaagagatctgcccaccttggccgtccaaagtgctggaattacacgtacacaccactgcacctggcctagcgctcaattttcctatctctgaaatcatttttcaaaaactgaaaaacacaagaaaaaggaaatataacaactgctctacttctctcacaaagctgtaattaagatcaaataatgtggaagggaactgccaattttaattcttttatggcactgatctcagggcaaccacatctgaatatcgtctagttggtagaaggaaaggattaagagtgggctcagggaaactgggattcaattcccaaagtctcatttaaaacagcagtgactggagctctcaatagtgtttcctggcagaaatagccaaggtggttcccaaggtaaaggctgccagtagttggtgggaaataaagagatgaaatcttgtcccctctatttcatgtgtccaacccaacagctcaacctatggatctttgaatatgacacttatgacaagaagaaaataaaacaccaacacacttcctgcagccctataaaccaagtagatcatttcaagattggcattccagcaggccaccaagactatacccaaattctctgtagtagtctatctactttacttgatgtcatgaaacaaacactgaatttggaggcagaagacttgggtttgaaacccacctctgcattaggcaaaatcactttattcattcagtttcaaagcttacagaccatctgctgggaacaccaaaggtaaatgggatactgattccttggatggacgagctggacatcgtatgccttacacgaagaggaagctgcaggggctaaagcctggggatgtgagaaagggctggtgtgtttgggcagctttaccttgcttggtttggctgtggtactggatgtcccctggggagtggggagggtgaggctggacttctccaatctcccctgtctctgtttgtgaaatgagaggttaggcctaggtggccaatggggctgctcatggctccaacatcctctgactctcctcacagcatcaggccttgatgtaactgatcacaggacttcagaacattgggctgcaagtgaatccagtgacactgaagtgttagaaatatgttggctgctcatactattgcaaaaggagctgttttggctgcaggtataaatttatacttgaaatatgccacagatactcttgagagtttgttttttggagtctacagaccaaacatttgactttggagggtagatacgatataacagatcaaaaagtttctttctaaaccagctaaaatatgaggtattgtgcagagagcctgaaggtataaccaatgcctagctgctattgcataaacattccattttttaacacacaaggcctggcacgttacaattctctgggtttccaatggtttgttcaccactagatccaaaggaccattgaatgaattagtgaatgaatgggcttcaacatagctcaataattatttgaagaataagtctatcttcacaaaaatgcccatttgcaaagataagcatcagaagaaatcccagcctgtgaatgcaaacatgagggtgcagaacagatgaaccaagttgcctcaagtccacccagaaggcaggtgaggcagagagtgaccatacatccctgtttactccaatagttttgatttgcgcctgtttttccagcataattattaatagtgtcccctttgattcttgaaaattcctggttgaggggttaagatggtcacctgacaaataataaaatgactgctacttctggccattgggactgaaaaaatcagtgtcactacttcacaggactcttcaccacagcaggttttcagagatctcaagagcaagtgagcaagctattatgcatgctgccttagaaggggagatacaatcaccatgggtaaactgtgggatatttgctgtgtgacaaagtcaatcccgctgattgcagttgttctggtagcaagaagcccagaacatagctgttcaagtgcagaatgaggtatatcatatccttaacccaccagcctggcatgagccacatgcattgtgggtctggggtttttacaggcttcagaagggaggaagtgcatgctgattggttcatgggtggccatgagtgggccagaaaagcaccataagctctcactccaggccgtggactccacctggaactgacagcctggcttccatgcttcaagtcatccctggcttgaaggtgctgcttcacacaacctgagactacaatatggacgcatcacaaacccattttaggattgtaaagcaagttcctgcagcacagtgaagaacagcttattgatggcagtagcagcctgtctggaccagctgctgcaaagatgctggctgtagcaggggtggcacagccagtgttgtgtgctccatggagctggtgggagctgggaacaggtgggagctcccaagttggtgggacaggagccctgtcctcctgggtgcaggtgcagccacccaaccatggctgcagacccaggcatccctatgctcttgggtgtcttggaagtccccctgcccctgcaggcttggaagtgtctgttcctgctgcctggcctctctcagctcccagtgcctactccagtgtggagcaaagttgtcgctgagcctggtcactgtcgtgacccggctgggtgtgtgggggcttggggcagcactgacatgccagctccctgccatctcagccacctctggactttggtcgccaccgagcatgggagggaggccgaggggaagggctgagggtggctcaaggtgggcctgcaggcacctcttgatgtagacagccagggtgtcgtggatgacatgtcgatggcagcaggaagcacacaggttcctggggggaaaggggcaggtccgcggtaaagcagcatcttcaagccaaggatgacttgaagcatgggagccaggctgtcagttccaggtggagtccacagcctggagtgagagcttatggtgcttttctggcccactcatggccacccctgaaccaatcagcttgcacttcctcccttctgaagcctgtaaaaaccccagactcagccagactcacagagacaatgggacaacctgcctgcagataggagctacccattttgggtctcatctccactgagggctgcactcatcaggatgacctgcctgtggaaagaagctacccacttcaggtctcctgagcactgtactatcactcagtaaagcacctcttcaccttgctcaccctccagttgcccatgtacctcattcttcctggatgtgggacaagaactcaggacccactgaatggcgggactgaaagaattgtaacacaaacagtgctgaaacacgcctccctcttgccacactgcaggcaatgaggaggagagaagagaggaggaaagagccatggccctttggggaacccagacttaggagctccccgagccagggttgtgatgccctctttggggctctacagttcctggtacctccaagctttcaggcaccaccatgttccccagtgcccacagtggaagccgcttgtggtgtgcctggttcagccgtgctggggtgccaaaggtggtatgtctggatgtgtgtagtggccgaaccctgtacttgcttactcgctcacacacccctcactgctctgtgcctggctcactcttggcaggcatggggtctgggccagtagcaaaagctgagcgcagcctgccaggctgagtgggcagaacaggcccagcgggcccaagcaaaacttgggcaaagatgccaccagccacagtggtttccggctggtgaagcaacacggtaaggatcctgtgacattatctgtttctcaaacagtggtctttggatcacttacttcagaattatccaaaatgtaaaaatgctcagaactcatcccagatctagtgattcagattttcaggaagtggattccagggatttgcagtttttctttttcaaagacagggtcttgctctgttgcccaggctgtggtgacaattgtgcactggtgcaatttctcaccacagccttcacctcccaggctcaagcaatcgatcctcccacctcagcctcccaagaagctggtaccacaggtgcacactaccatgcctggctaagttttgtgttgtttttagagacagggtctcactatgttgcctatgctggcctcaaactcctgagctcaagccaacctcctgccttggtctcccaaagtgctagaattacaggcatgagtcaccatgcccaggatttgcatttttgaaaccaacttctaaacattcttatatgcattaatgcaataaatataaaaaagatatagcatatttagctgaaacatccaaatgaaattattatttttcaggaggggatcagagggcaacaatctccaatgagaggaaatgtttgacacatacaggttggtttctgttgtgtgaccatgaattattgtgagttgctaagttagttttttggtgtgtgtcagagtaaatctcaagttttattcaaatagctggttggcaaatctcaagtcattggccaaatgagaacaagccatgtaaatgacacacagatgcacacaactgatttttatagccagacctgagagttagagatggagatggacaggccacatcatgaagtctctcccatgtaaggtgagaatataccagattcaaagaaagtagcttctgcatactttttttttttctttttgagacagagtcttactctgttgctcaggctgtagtgcaatggcgtgatctcagctcactgcagcctctatctcctgggttcaagacattctcgtgccttagcctcccaagcagctgggattacaggcatgcaccaccatgcctaatttttgtatttttagtagagacagggtttcaccatgttggccaggctggtcttgaactcctggcctcaagtgatctgcctgcctcagcctcccaaagttctgtgattacaggcagcagctaccacacccagcccgtatactctttgttttttgagacagagtctcgctctgtcgccaggctggaatgcagcggtgagatctcggctcactgcaacctctgccttgtgggttcaagtgattctcctgcctcagcctcccgagtagctgggactacaggcacatgccaccgtgcccagctaatgtttgtatttttagtaaagatggggtttcaccatgttggccaggatggtcttgatctcttgacctcgtgatctgcccgcctcagcctcccaaagtgctgggattacaggcatgagccaccatgcctggccacctgtatattcttaatgtgatttcatccccaaaaatattcaaagtggtggtggtggttgggggaggcaaatcgcccccaagggtgtgccatgctaattgagaacacagaagtatgagatattacagatatgcaggactggagagtggatcaagaaagctgtcaaatatgaatgctttagcctaacaaagtatccttagaactccccattttccctttttgcagggggatacatgttttgtgaggtctgaggtttatgaaattttgggggctctcaagaatgcaaaagtaattatgaatacaaatttagatactaatgtgaatgtttattaatgagaaaaaaattacaacatattactggaaccctggaagctgaggtccctttcctttgagaaatgtttacataaatgtttcctgattgcaacccggctcctcctcttcatctggaacagcctgtctacattttccggcaacaatcagaactcacagggtctgatctgagcgcaggtccccagtacttaagtttaattagcttctttgtaaatatgcctttacactgcaaagtagatttcctttcttaattagctaaacagctaactcatcaacttatattacttagtcctggaaagacagatgattattactttcaccctcaagattgcacagcagggagggcaattctacaggaaggctgtgatacagtgtctgtctccaggatgactgccatcaattccttccctccctgtacaagcatgttattcttcacatcaagaggtggatccaattcccctaacttcaaacatggactggccttagagatttccttgaccaacagaatgtgacagtgatgatgttctgggacttcttaggctaggttttaagaagccttgctgatgctgcctgggactattttcatttctccttttctctctttctccctttctctctctctctctttctctttccctctttcctctttccccctcccctccctcccttccttcctttacttccttcctctctctcttgctttctctctctctctttctttctgtttctttctttcttcctttctttctttcaagatggggtatcacctatgttgctcaggctggccttgagctcctgggctcaggcaatcctcctaccttagcctccaagtagctgggactatagctacgtgccaccatgcctatctgggattcttaaaccacccactcttagaatatttcctctcagaatccagctgctatgttctgggaagtcaaaaccacctggagaggcatgtagtgctgcctcagctaaactcccagttgacagccaacattaacatgtgagaaagccatcttggacttccagcccagacaggtcttcagacaaccccagccccaactcacatctgactttggccatgtgagaggtcctaaggaagagccacccagctgaacccagtcaaccaacagaactatgaaagagaatcagaaattgttctgcaaagcctctaagttttggaggaggtttgttttgtaaccaaaaaaggcatagaggaattgtgttgggatataactcttgtatgccctctatcccaataagactggaaagatgaaacatgggacactgaactccctggagttatttctctggtccctatttgtctgtaagtggtgcttgttccctctgctcctgtcttccagcaggtaaatactaggaagaccctcccgctctgggattgggagatgagagcccacagctattccatgggtttgatgtgggggctagaggagaggaatgagaactccattttggtctcaaatccaaaccttaaccaaaccaatctaactttatactagttattagttataaagttattttgaccccagactccagtgtctatttttttaattggttcagaaaacttacggcaaaaaagcatattttttcctctttagacctcaacaagtaccaccattcttcctttcacatagtctggaaagcgaagtcttgttttttaaattttacttggcttcatcctctaaatccagtctgcctcattatgccaccttttagtttccacggtcccttccccagttcggctcctcactgccacagtctcagtcctgcaatgactgccctgtctgcagctcccccatctcccatggttacggctaagatattcctcttgctgaagaccttatctactgccttaggtccagttcaaggacctctggggcagttagctttattagagctaacagcccttcaagctaatctttcaaactcaaatgaccccataaggcaaattttatttcacactagacgatttcttcctttctttaaaaaaagaaattgtcctatctctttttctttagatgatatacttctccctcctatatccaaatcccctagtcccttagaaagcaggaaacacatgctttatggctcatccttctttggctaaccatctaactagccacaaatttgaattccttgaagatatgttccccagtgctctactcagtaaacaccaccggactcatgatacctatggaaagaaccactgaaattttgtggttgtaatggagtaggaagaagagctaggaactaatatttattatgccaggttttttgttaagtacttcatatgtcattcagttttttccttggtttccttagtataacaactctattgtcctctttttcaccaaacaggaacctgagatccagggaagtactttttcaaggtcacttagcaagtgcaacgatagagcttgaagtcaagactgattaccagtctaagttttttaaccaccatattatatggcctccaggtttttttgaggtgtccaggaaattctttaaaacaaatttttcttcctcttccaaatagaattactgttaccattttttaaaacttcaagactttcggccatgcatatatgcttttttctgcatatcatcactctctttgtatgaacaatcatgttctgcttcacttcagatggcacagccattttcccatgtcagtatgcaccaatattgtttcttatgaatgggccagactgtagaaagcacaaaatacaacaaaatatgttctttctccaaatgggattttggcttgggaacaaaaagtcacccagaatcagaagattataaatgttaagatgtaaacatgttaaatattattcatgttttcatgggagaaaatgggggaatcccaaaaaaagtaggaattctaagagacaaggtctcactctgtcaccaaggctcgagagcagtggtgtgatcatagctcaaggcagccttgaactcctgggctcaagtgattctctggcctctcagtctcctgagtagctgagattacaggtgtgcaccactatgcccggataatttttaaactttttgtagagacagggtttcattatattgtccaagctggtcttgaactcctaggctcaggtgatcctcccacttcagcctcccaaagcattgagatgataggcgtgagtcactgtgcctggccttcattctctctctttttcatggggaggggtggtgggaaacagggtctttctctgtcgcccaggctggggtgcagtggcacaatcatggctcactgcagcctcaaccttccaggctcaagtgatcctcccacctcagtatccccagtagctgagactacaggcaggtaccactaatttattatttataaatttattatttatagatactacatttgggagagtttattatttattattattattattattattattattattattattattattattattatttttgtagagacaaggttttctccatgttgcccaggttggtcttgaactcctgggttcaaatgatcttctcgccttggcctcccaaagtgctgggattacaggtgtgatccactgtgcctggcccattctctattaatatgaaagtgaatacaaggaatctttaagtgtgaagacctccagaagccggtggggaaggaagactaatatttactatctctgaccacgtaccacatcttgttctcactgatgctctcatttcactgatgttctcatttgcttttcctaacaacttgtcaacatagggatttttaccccaccttaaggaagagaaaagacaggctgtgattgcttgtgcagtcctctggtaacactggtgctgggttggaattcagatactacagtctaaggtctttgttcttttaaagaaggctgtttcagataaaagaaaaagaaaatctagattttagaaaatggagagtgagctaaataagtgatctggagttataaaaaatacctgataggaatcttgataaccaaggaaaggaaaaatgaagcagaaataaaattgggcccctgtggttcagtctagcaggggcggaaagggggcttgctgagctgaggagagagctggctccgcaaactggccccaaatagagagggccttgtttctccaagagcccaaaatggggctaaaggcaacagcacagtctttgagtggaggctggaaagaagggtgaaattaagaagaatcctagctctacggagggcctgtcactggccaagaaggggtgtggcacagagaacatctggagttttgggctgccagcctgtgctgggctgtctgagttacagaacaggagatgtgtgctggactgggactgggagaattgctgagaaagaagaatgtgaggagagcctgggctccagtgcgtttgagttaacaaatcctatccttctccactgaactctttcaggacagtataaaaaagtttaatggcaaacttcactaagcaagaggatgggggacctggctgggaacattttccttatgctgggggagaggctgcactctatgctgttaggcagaaaaaaccaggcactgtaggctagaggggagtcaaaacatcccctacactcaacccacacctccagacaacaggcctgtgctcgactggtggtgagggcctctcttggaattcagttcttggccagaaatccctgccttagactggggaaggtttgagagaagctcagcaaacctggcggctgctctttgggtttggcaaactcgagatttttccagcgccttgtgttcagcgaaactgaaaatgtgtttggctagaaacccttcactaatttttaaactcctgtgagtttctttttttttaacataaatttgatccacatgtttttgatttatttctatttaactcatcaaatcaaattaggagccacaatgatgaatgggaacaatgctgatttccaagaagatttttgcgcactttttctcagaattcaaacacattccacccccagccccctacaactgttaaaactaccagactgagctgggtttgaaatttagaacccaaatgtgaaataaagatccacgcctggcaaagacagaacatagcaggggaatgttcttagggagtcacagaaagaaggtgggcccaggatgggataatgagagaggaagtgggtcagttattcttccttaggtggtttcagtatgttaatcgagctttctaggctcccaacagaggccacttctcatgggaatgcttttgtcactaccacccagggaaagggggttcctgctccaaaaattgtggacagggggttccttgtacctatttttttcccttgtgttctcctccatagtagccaattcaagctgctcttccgcttcccttctaacagttccaccccctccccccgccaccccttcctggctctggtggaggcctctccatctggaaacatttaacatgtacaacaattttaatcttgtgcaagagaatcttagacgcactacatacccattaagctaaattataggtgcacagtgttactttgcacaattctgtctggtctcggtttgcacacacaacaaaggccattactgtctttcccaattaccctttctactataccatcattttccacaacttcaatctgaggccaatagtatttctctgggaaactctggcccccaaggtcccaagacaaagttgctctcttaggtttaagacaaatgcaccctcatcagagccccttgaaccagtacttggtacgtccctaaacactgaccaaataaatttccttgaatttggcttctctcccctacagaacctgatctaattaaatagacctgggtacaagtaccagcttgctacttattaactgtataactttgggggttattttactttccttggttccaatttcccaatctgtaaattgggtataataactatacttacctcacagtgttgttgtgaagattaaatgagatgtgtcctgtaaaaaccttaatttgttgcatggagatagggaggtgttggtcaagggataccaagtttcagttaaacaggaggaataagttttagagatctattgcatggcagcatgaccacagttaataataatgtgtatttttaaattgttaagagtagattttaaaagttctcaccacaaaaaatgataagtatatgaagtgatgaatatgttaattagcttagtcattccataatgtaaacatatatcaaaacgttacactatatcccatcgatatacataattatttgtcaattaaaaataaacttggtatgttgtctcacccagactaagtagttaataacaattagttttattattattgaaactgccacactttattcaactctagaacttttctaagagcatttaaatttttgcagaggttgacagtttcattctaaatcctctccactcccacgaatgctgaagtgaccaactcagtgtcctacaaaccagtatcattcagcgaggtgacataaggtttctcaccaaccacctgggattcttaccgagttctcagggactcttccatgcaggcccaagttttaaacctacagtcccttcctgagatctgcagtagcagagagattggaagatctaaaatctaatgcatacagagcactctccttcaagccaagtggagctgctgcttctcattttatataaaaagtaaatgtgagaaagggaggtggagaaggaggtttttactttgctttaaggagcaaaatcaagacctttacggatgctttttggaaagtagaaaggtgaaggcaacatttaagttatctgacaaatgcctctcttgtaagggggagaatagaaaagtccacgagtccagttacaagccctgtgctcaatggcattcaaaaagagagttggaggtccgacatttattgctcttctctggtgagaagtagttttagcagtaattcacggatcctgatgttgggaaggaatccaccagcttctagggggaactttggacacctaatgtagtcatggtcttcattatgcagaattgctatgaggactcaagagagaacacttgcagaattttgacaaatggtaattattatttctaccgagctgacctcacttgaaatcctgggtgataccaggaaatgtgtgtatcttccatgcccaacatttactagagttttctctttcagtggcttcttagtcccttttatctacatgtactatggatgccagcccagctctaaaaaaccctaaggaaaccactccctggctcacagctccgccaaagtggtgggtctaggtgactgtttgtgcccataaagggtactgaagtggacatataatctgaagggacaaatacacaggctgggaagtcactttagtctgatataaaaggtgaactgggccaaccagactcctctccggaaatgtggaattgggagagtgagaaactgggctgattggtagcagagccataaagaatgtggttggccacatcagtggcagaactccatgtgagggctgagagctttccgctgtggaggctttgcagggctgccttgatttcaaaaccactttcccataaagcctggctgttcaatcattctgctcatggacaccataaatatctcttctaatattattactattgtttttttgagtcagcgtctcactctgccacccaggctggagtgtcatggcacaatcatggctcactgcaacttcgagctcctgggctcaagcaatcctctcacctcagccttctgagtagctggggcaggcatgtgccaccacatcaaactaattttttactttttgtaagaacaagggtcctgctatgttgcccatgctggtctcaagcaatcctcctgccttagccgcccaaagtgctgggattacaggtatgagccaccatagccggccttcttgcagtacttttttttttttttttgagttagctctagtaagtttctgtttcctctgaccaaaatagtctttgttaaaacagcacctgctcttgggaagtacatgcaaatagagttatgtctaaatgttctgagcatttccagtccaaggaattattttaatgcttaattacaggcaagccgcagtggctgatgcctgcaatcccagcactttgggaggccgaggcaggtggatcactatagctcaggaattcaacaccagcctggccaacatggtgaaaccctgtctccactaaaaatacaaaaattagccaggcatggtggtgcccacctgtaatcccagctacttgggaggctgaggcaggagcatcacttgaatctgggaggtggagggtgcagtgagccaacattgcaccactgcactccagcctgggcaacagagtgagactccatctcaaaaaaaaaaaaaaaaagaaacaaaaaaccttaattacacattgtagtaaatgctattggttcctgacttatgccttcctgatttccttctactatcgaaattgggagagttaaaactcttgctctcccaaactcccttgcagctagaaggtcatgtaacacagttctggccaatgagaggcaagtgaatatctgttgggacagaggctgcccctcctttccatctttgcatagaaatgtcaggcttggacctactgccaccaccttgtaaccatgaagggaaagtcaaagaaatgcagagacgctacagccctgacacaatggaggtgctgaaccaacgccagcagccaccagatttcagccttcttactgggtgagaaaaatttacctttaaactcttaggctgttgcaaaagtaattaaaaaaaaaaaatggcaaaaactgtaattacttttgcaccaacctaatactatcggttagacttttccaaatttggaagcaaaaaaatttctaaatgatatatccagaaagtcaacatagaaatcgatactgtttcctatatggtaagacacatgattttttttaaaccaaatatatgaccaacttgtttgtaaattaacttctctaaacatcagctgaatgacagaagctcttcaggtaattagtctaacgaggggataaggtatacataaataactatgatcaggccaggtgtggtagctcacgcctataatctcagcacttagggaggctgagacgggtggatcacttgaggtcaggagttcaacaccagcctaaccaacatagagaaaccctgtctctactaaaaatacaaaaattagctgggtatggtggtgtgtgcctgtagtcccagctactcgggaggctgagacaggagaatcacttgagcccaggagacagaagttgcagttagccgatatcatgccactacactccagcctgggcgacagagcgagactttgtctcaaaatacaaaacaaaacaaaacaactgtgaccgaaggcagacagtgaaaacactgtacgtggaaggtgctctatgtatatcccaagtagggagagacattacttctggttgggcaaggaagaaatcagggaactctccataaaaaagcatctaagctaaactccagagaaaaaaagaatttggatgtttggagttggggagaaagggcattcttggcaaaaggaatagtttaagcaaatatgggaaacctaaggtcatgtaagggaaacagcaagttcattctggctggtgcaggagaacaaagatcagagaagtccagaccaaattataataagccttgaacaccaagtgaatgggagtctgagctttactctccatgcctgggctgccattgaaggtttctgagcaattaggagtcagtttttaaggaaaatttacctgactgcaataagtagcatggattggcagacttagaaaatgtcaggaggaggctgtgcagccatctgggtaagaggtgatgaaggtgtgaaccagaagagtcaaagtgagaatggagtgggaaaaagacacagacgtgagagatacagtggaagtacatataatacaagttggctactgtctggatatggggtgtgagtcacaggaggaataacgccgaaaatgttttattgcacaaaatataaacaaaaacctcatgcggtacctctggagctgaagacaggaatggtttaatgtagatgttggagtcatgcaccttcaggtcatggtccccaagtcccctggtcactccaatagttgccattacccgggcctaggagtataagcagagggtcatcagaaacacgcacacagtgaaagcatcccattccagtgcagctgcctgggctaggaacaaccaaacaattttccagttcctcctgcccagatatgtttccaggccccttgctgctaacatacgtggatagctcttaccaagaaagggctcaccaaaatcacttctgtatttgaggagtgctttttctatccattatcttaagcttgacaggttgctgctgtttcttttcagctttctttttttggagactggaaggaaggatgtccaataaactaactccaatgcatgcgtgacgtctacagctgcagaaatcagttcatatcaaacccaataggattgatcgatccatccatccatccatccatccatccacccacccatccacacacccaccaatctttctgttacatatccactgtacaagtatttgctcaacaccagctatgtccttagtcctgtgatatgtactagtaaaaggtgtaaaaaatcagaaatagctcttgccctcccagagttcacctattatgttttatggctggagaaaagaaacttatcaactctataacctatcctgctaagatctccacaaattccctctgggtggaaaggaacaaaatgtcaccagtgctgtgacatagctacacagaggcctcagggctgagacctcatcctgaactgtttttgaatggtgtaaggaagtaacactattacaccaatgcctacacagtcagcttaaatatctcctgttatgctgaagatctgatttacccaaacatttattgggtgcctactatgtacttacatcatatgttggggacacaaatgtctaaggcctcgtccctactacaaagaaacttggggccacgtgcggtggctcttgcctgtaatcccagcactttgggaggctgaggcaggtggatcacttgaggtcaggagtttgagaccagcctggctgacatggtgaaaccccatctctacgaaaaatacaaaatttagctaggcatggtggtgggcacctgtaatcccagctgcttggaggctgaggcatgagaatcacttgaacctggaaggtggaggttgcagtgaattgagatcatgccactgcagtctagcctgggtgacacagtgagactcagtctcaaaccaacaaacaaacaaataaaaaaaccaaaaagaaacttggtaagggagataagagggagatgtgtaattaataacacataaaatatggttaagtactgaaaaacacatagacaatgggttatgcaagtttagaggaggtaaaaattctactgagaaggctccacggaggaggtggcacttagcacagaaaggtggattgcatcaagacaggcgacacagagggatggagtgaaagtcatcctgggtggaagaaagcagtgtcctaacccttaatcataaaaaatatatccggtgtagtgaaatggttcaaagacctgagcttgaatcctcactctattacctgggtgataagagtaattacctcctatgagtggggatgaagtaaataaatgctaagaaacactgcaatttaatatattgtcttcatcttcatcctagactgtcaacagggctgtgaattttgaagccagccttggttcggaaggtaggcagagttcacattaagcagaaatgaaaccatgacacctttttgagggcaagggtcagaggggataaagacacgagacacagccagacacagtagctcacatgtgtaatcccagcactttgggaggccaaggcaggaggatcacttgagcccaggagtttgagactagccagggcaatgtggtaaaacctcctgactacaaaaaatacaaaaattagccagtgtggtggcatgcgcctgtagtcccagctactcaggaggctgaagtgggaggatcacctgatcctgggatgtcgagcctgaagtgagccgagattgtgccaccgtactccagcctgatgccatgtctcaaaaaaaaaaaaaaaaagtgatgcaaagcaaagcctggggccctctgccctgctgggaggctggactggctcccttctagccaagaagtgctcaactctaaatgtgaaaaattctgagtcccttgtggctctcctgctctcctccctgaaatggcggcttctctgtgtgctctttccagccaaagaaatctgatgtttctgctagtgactgaccttgtttacgaagtatccaggtgttacccacaccagtctttaaaagcatctgaagaaagaaaatgagaagtaatggccacagaagtactctgaaatttctgcgtaggggtacgcggagaagaaagagaaaatcccagtccaggatctagaaggagctccaagaactcatggagtcctcagaaaggggtggtatctaccaacaaaagcaaaatggagacatggtggcttttaaataggccaacaggtacacggacagaacttgccacctgcccatcgcaagaccatcaagcttaaattacctgaaatgcttgaggaacatgatgttttggtgaattgaactttatactaaaattagaaaactcttgctccttcaaatcttactgctataaacttccaagaatacatcattccattttcctattgtactaaggaaagtatactgaacataactgaacagcttatttaatacttatgcatttatgtcaggtaccaggctagacaggaactagagatacaggggtaacagaatgtgttcctgagtttactggaactcactggatattaaagggtaatacagagaatctcagccccacaaagaaatggagctgcaggcataggtcattgggctgaatgatactcattaatggtgcccattgtaccaaaaggcacaaatatttatatcagaacagtgcctattagccctgacacgattcttaaccagagactgtgatctgaaaggtgttcattttcatgaatggggtatgttcgtttaaaaaatgattcctacatggatcagatatttgtgtttggtattcctccttctgttgagatgtctttttgcattgaaatcactgctggtctacacggagcccaaaacctaaccatgtttgttctcttgcttttgctctgacacacacacacacacacacacacacacacactctgcccatggaaggcatcctttggttttcttctgagtcatttcttcttgataaaaactatcgtatcgaatgctggaaaaattatcagttgaagactcttctcaatgtgaccacatttttcacttggaatgcttcacaccgagttgaaatgtattagtgttccgaggaagaatgcaatgattcagaaggtgtttgttcttactaggaaatagattccaagcttcttgctctccactccaggatttcaacctcctccaggcctctgctcagagaccactttaggatccacagcttttctttggttcgacaacgtgctgttcagtgctggattctgactggaaccctgggagctgatgatggtctttgttatcttagtctggactctggttgctgtgaccttatagtctaattacagtgacgctttggactctcttccatggggcaagtggcaaacagacttgcaaagtctggacttccatggtggagtctgagacgcgcgaagcagacagaaagccaaggcaccacatccgcagctgcccctcgcttggctgcgtgatctgcctgagctgttttaacctcacagtcccagctgcctcgtctgccagatggatataacacagccagcttgacctgcctccttgctcgttgtcagatataaatgagatgatgtgtgtgaaagtggttcatgtttaaacactgtaaaaagttattcaaatggattgggaagggggactttattttcacaaaattggcttgagtcccttgtgctcaccgcccacctcccacccccactactccttggaccctgaagacaggaggcctgaaggatgatggatgggatatgctttcaagctgtcaaggctataaaatcacaagctgctgagtggaacacacggactgccacgggctatgtggagcgaaggcgggacagagccctgtcctctctacccaggggaagcacacgtgcctaccttcttgccttctccatatataagggggaacttcaagtcctcatcctcaatggttttgtatgccctgtaggggataaacaacattttaaaaaaggtttgcactcaattagtgacctgctgccctgacaccgactgctagggatttcattttccctgagaccccatccactcaccacactgactacctcttcctttatagggagttgttctccctacagaattgtgtgtgtgtgtcttttaccaaaccagaaaatactgtctttatatgcttgaagagggaggaaataagttggcatatgcataattagcaaaaaggggagatgggtttctggccttagggtctgtgtaataatgaagtgacccagcaacagtattctcatcacgaatccaaaactgtgagaaacagcagagctcagagatgaatggagtgtgaaactgcttcgagagccagttctcaccttcaggggttgtttataccaaaacagccttgtattgggatggctagggaagaaatctttcgagcctgtttgtcctctatataatatgcaaggttggtaaaacattctttgtttcacaatagcttttaaatagccactcaatacacagaaagaaccttcagtttatgcctcaatggtttattccagatagggttctccagtgccacagcctgcacagcggaggcgggtaagatgaaagggacagagctgatgaagaccatgtcttgcaattttgcttataaccaagttaaaaaacaaacaagcgaacaaacaactgttagcccagttacagctgtttatcaccttgagcatgtagcttcacctttttcagtctcagtttcctcatctgtacaatgaggctaatacacaggatacaaagagctcagtacagagcctgcacttagtaagagcccacttagtggcagttattactaatacttagtagataattaacacttacgtggcataccggttcccctttctgcaaaatggggataacactgctcataacttcaaagttatttaaaagactaagtaaaagatagggtaggttctgctgaattaggtgctataagtagatgcttttctacaacaacatctcctgagtgcattaaaaatcctaatttattaaatggcctgccattcctggacatatctaggctgcttgggagtgagtctgaaatcaaatttatggaagctcttgaggtacaaaagaatgtaactaaatttaaaaagcatgcaaccccaaagttaaagcaggtccatcctcagaaagttacatggtaaggtgtccttcccatggggtggagaatcagtgaggttttggcaccagatgtgcctgagctggagttcagcaatgcctttggtatagccctgcacaagtagatgtgctctcagtccctcaggatcctcattaatcaattagggcaaaatctggggctcattcgtgagattattgcaaagattaaaatagggaaatgaatgtggagagcttaggaggtacttagcactgtgcctggcaaaacaaatgctgctgctgttgagtgagctgagaggtattctaggaattgaattttcaaaaaaggaaatatactgtttccttcccccaaatctaccaaactaacacaaagtggaaataaccactttgatgtttttacatactcacatgagctattttaaacactgtggtatatgagtttggggggggaacaaataaagctattattagaagaatttgggttttttaaagctttccaggtgattccaatgtgcagccaaggttgagatccactactatacatcaagcatcaattaactaccattcaaaatgattcagcaattagccccttatcagcttgacccttaagacaacagactacatggctcaagggagaggaggaaaatggcctgagaaaggccctgagatgagcgtgaacagggattgaagaccccatgtggagagtgaggagacaggcccgcacagagaggatgcagcagtggagaccagatgtagaaaggggctgggccttgagatccaggcacaggaggagcctggatctggtgtagaagagttgggtctatgactagacattcacaggaattaaatagagctagaaggctagaattaaatagaggcagaaggctgcagctctagaaccaatgactgggtattacctagagcttaatagagacaggcgaagagcactcttaacaggcttagagaagtagtaagaaaactgctctatcacaagccgggtcattgaattctcacatggcagagtgttgcaggagcacgaagtccatgtcccacaactctgaaagacacacacttagagttgttacccacaggaccaaaccaaatgcaaattttaatattatatgttagcttctgcttatcttcaggaacaacaaaacattagaaatagaaacaatggtggaaaaggaaggtttattctgccccgccagtgttggttttcaatcaactatgagcactccctctcccccagcaactaacgacaagggggaatagcaccaatgaggaggaaaagtacaacaccttctccccctccatctttctgaatcctaagcacagatcatcatataaagttaagtggacttccatccatagttacaaagccttgagtaataaagtataaaatatagtactcaagagttaaaactggcaacttgattagagtctgtataaattaataatagctaatagtaatcacagcagctatgatttactgagcatcttctacatgccagacaccaggctctgtgctgacttatagtatctaaaatctctcaatggccttataatgtcctgtcttacagaggagagaactgagcccagagaggttaagttactcctcccagaccaaaaaggtggagtggccttaaaaccggacttggacttttccggaaaacatgacaaagaaatgtgatatcaggacttagctttgggaatttctcattctagtccgagtctgaaatgagaccattattgtccactctcttcgggtgaccagctgatatctgatgaagaaaagaagacttttggcaaaagaggaaggggaattttctgtgtgagtggcaaaagaacaaaaggggtcatgtttgtacaaaactagtggctactacggtactgggtctacagagaagaagagaggaaagtcagcagaagtgatggtctgtgttctttttttttttgagacagagtctcgctctgttgaccaggctggagtacaatggtgcgatctcggctcactgcaacttctgcctcccaggtccaagcgattctcctgccttagcctcccaagtagctgggattacaggtgagtgccaccgtgcccagctaatttttgtagagatacggtttcaccatgttgaccaggctggtcctgaactcctgacctcaggtgatctgcccacctcggcctcccaaaatgctgggattgatccatgttcttagacctgcagctgcttttctggccatctcgccagcaatgagtgaccacagagtcaaccaagccccctcccacagagaacagactttcctcaaactgctctcagtttaaggaggccatctaagttctggcccacttggaaggcctgtctgttttatattatagtccatgtcaaggctataggcttgaatttatgcttccagcttgtccttggcttccttctttctcatttgggggaagataggagagtgaagcttgagagctccaagacatgaaggtactttggatttgagatgaatagagagtgtctagtcatagaaccaattcttctacaccacatcctaagatttttgaaatcctaattaaatttttaagaactagcgccccaaacaaatcactcgctagttttacaataatatgactgaccagagattatattatttgttacgagatagcaaaactgaaaggcttaggaaagattttctagacaaactcttattaatattttgggccaattccttaatgagtatttatgaggccaactgaatcatttttttagatgagaaaaaaaatgcaaggcttaaaagggttgctaaattcttggctttcccaaactgagaggcattattctcagaagtttccattaaatacttttttaaagtaatagtttcctttgtaatgttgattgtgcaaagctgtaaaaaaaaaagccactgttggtttggacttcctggaaggagcagttcagcaataagactgaaatgccaccaagacagctgtaccccaagtgtaggaatcccttctacaatacacctaaccttggttcctggcctctcctgaatggactgccacagaaagtcactgtcctaggagtttaacggtacttaatgtcagcccattccattggagaacagctctgggaaattctttcttaaactgacccaaacccgctggcccatctggaaaaacatgaaataaatccagactattttctgcttgagagctcttcaattgtttaaagagaactatctcaaagtttccttttccttagttctttcaactgttcttcacaggacctggaggatcctaaccactctagtccccatgcatccaacaaacagtaactgagcactgaatactgtggtggtggccctctagggtctttctggttggccagtgtcctcaaaaaatggtacccggaactgaaaacacttaagatgtggtccaaataagaaaaaaaattattacttcttttgatttgggccttgcattttttaaaaattaacaaagctatttccattatgtgtatttttttttagggttacatatggagactctgaatgaaaacaaatgaaaaaccctagtccacaagaaaaaagacctgagaatgttttttttggctcatggtctcctctagtttataatgacacacacaatagatattttaccctgaagggaggactccattgcccttattaattttatcttgttagttttagtccattgttccaactcactgacaacttcctgaactcagatccttccatccaaaatatcagctgtctatgctatatcatgttaaatttgataagcagccctgccatcttcatccacatcactgaaaaaattgctaagtggaatcattagagaccttcctactggccaagctaaccacacaaggggggtggcaacatttcaggcatgtgaaggaaagcaattcaaaaacatcaaattcagcagtatcctttttcatgaaaatgaagaacctatcaatttcctttttattttttatttttatttatttatttttttgagatggagtttcactcttgtcgcccaagcttaggtgcaatggtgcgatcttggctcactgcaacctctacctcctgggttcaagtgattctcctgcctcagcatcccgagtagctgggattacaggcgtgcgccactacccccagctaattttttgtatttttagtagaaacgggatttcaccatgttagccaggctggtattaaactcctgacctcaggtcatacgcctgccttggcctcccaaagagctgggattacaggcgtaagccactacaccgggcaatttccttttcaatacaaaaaacagatggtataaagctcggcagaatcttgtctggtggagaagcacagaagacagactcaacagtagagggtggacaatgagatattaatgtttaaagaggaggtgtttaggatttaaaaaggctgtcaacactgatccagatggacactgtcctcatggatttcaactctcctggaatagctcttgggctatctatgaagcaacttaactgaaccattatccactcagtatttctccatcttgtccaaaaggctgagagaagaaacaatccgatttcttacaaactcagaatatatctatgcatacagtattcacccaatctaggaaccttacccaacaagaacagattactaattgagcctgccttattgaacctaagctggctctcctgatcataccacctccagtggacgacattccttcaaatccctcttgctcctaaggcacatgagtgatgcttatagttcctacatcaaccccatccttctaggctgaggctctctcactgcccttctgtcagtccctccatctgcctcatatccccctcccttacccaccagcctttcaggacattctcccacctgccccgatgacttcagcctaggttcagattgctttttcactctttcccaggatgtcattctcagcattttcttagaatttggtggtgcttttggattcctcgctttaaaactcctagctcacttcctgctgaccttcttctctgttccccatcatcaccctggtcatgtggcctgcagcaagaacaccccccacctctgagattccaattctgaatcatttttcctctctcactcccttgttgaagctctcaggccagtttctctccttggtcctgctattcttcctaccttatggctaaacatgttcctgatcctgtctccacctgtggcaaagctttttgatacttttctttgctagaacttgtcaccttctcaattttccagtaacacaacaaggattgagtattttgtctattaacattatgtcaaatactgtcatctctacctttcaaacaaatccagaatcctcagatttcaacaccttccctgctgtcagagccctagcaccatagtttcttgcctacattattgggacggatccatcaggcctctgtgcaatgatctaggcaagaggcgatggtgctaggatgatgtcaccaggtggatggcagtgagagtgttgaaaactgttctgattttcccttactcctgttctcagagcaactggagtaattattttagaatgtcaggtcatgtcattaccctactgaaacccatcaaaggttttctattgcgatctaaataaaagccaagtaaccagatggtcttctttaacattgttcctgtcccccaaatttcctagtcccctttcctgctttattttttttccatagcatccaccaccacctaacagttaaagaattttacttccttactatggttattttttctactgcttcttcatgccctttaagttctatggggatagatttttgttttgctacctatggcatctcctatacctacaagagtgctcaacatataatgggtacccaataaatatttggttaagcaagcaaattaatactaccttccctatgcagaggctttattcgtattttcttgttccataatatatttgcaaaacaaaagcaaagagtctccttgttcggctgctttctatgtctgactatgctgttccggctgatgctcactcacaagcacccctttcccacctttgccctagtgggctaggtgctgtccttacaggctcagacattctctatgaacatctgaatttgagatgcccatgcagccacaccgaagcccttttaccctaatgagcagcagttataggacttctccaccataaacatactttgtctttgtggcaattttatacatcccttcagtaaagctttgctcacactgtcctcatagctgggaggcctgctagcaaatctcccacatttctcttttaatccacaagcatcactctccaccttaaagttctccactgaattcccgtcatcttaaaatacaatccaatgatgaggccctccatgatctggcctttgcactctgacatcgtcgatcactctgctacgccttgtaacaatggctttcttgtttgtttgttttttttttttgacacaccagggggcctggtcattccttctgtctgggccattcttccctttgatcctgccatgctggctcctggacatcacttggaaaggcctcccctgaccactcatctacaagtctggcgttctctgctcctgctcatcctgcttcagtgcttcaagcacaatctgaaatgctcttattaatttgtttaccttctgtcccaacatcctgcacattaactccataaaggcacagactttcttcctatttacctgtctatctttgtatctacaattgtgcaagcacatggtagacataaagtagacacaagctaaatggatgaatgaatgaacaaaggctggtatctctcccttagcatgtcagtttccctctaaagatatcccccattcactctgccttaatagctagcttttctatggctaatattcatggctgggttcccattggtgatacctctgacatatgtttacctacttatattaaaatttcaagttcccctttattattagtatatatacaaatagttataaaatcataaaaaataacatttatgattctctcgtctattcctttctcagttccttagtaccacgtcagaatggcagtttttttgccacagctattcaccagtgtatatggtgttaccaagacaattttctaacttggtttaaaggcaagttcctcctttaaagttcttcctagtctttgctggattcctccatttccaggaagagcccctactctgattgcttaacccatgggccaggaacctagagttcacactttggcatcatcaacataaatcacttcccacgatctcccttctcttctaagtcatgaccttgagctacagagagagagagagagagagagagagagagagagagaaataccacttgtttccctaagtcttaattcccttagcaagacttcaaagtcatttaagaggaacgagaggaacgtgatcccctccggggggtataacaggggaccctattatgctcccttcggggacagcataatctcaacaattcacttgtgcagctccaatgacacacaccagtgagtcacattcttccactaatctctagacattgccttggctgcctcttctcccctggggatcttccttcctggagtctctcttccctcctggcagagcccactgtggtattaaagcacaccaggcttggggtcagaggttctgaagtcacatctcaatcgtcatgtgaactggctgtatgaacctgggaaaatccctcagacctcactgaatctgcctcttcaactggacacttcataggatggttgcaaggattaagggcaaacatgtctgggaacatcctttgtgaaggataaggtgctatttggccatcagttgtggctattaaggtcttcggagcctcattctttcttccatgcagatgtagagctaacaggcaaccgtaagcaggaagacacagcacatccccgtaggaaaaaccacttcctgctgagcaatcaagccacctaattcatactttttctactgtaagcatgaaggagcatacccgtgcaactttatccagaacagtccattgttctcctctaaaatgaggactcagatactcagaaggatgcctcagagataataatctaaagaaggtatagctgggttagattgaaatagtcataaaaggagccctttttttttttttttttccttagctgggagctcagtgcccctccaggagggaggagaaagccacaggcagccttgttttcttctcattagaaaccaagtcctagcccggcagaggcacattccacaggggctggttgggtttgggaggaggccggagcacagaaacatcttcggtcccccttcttgcctttctataacaaaatctcagcagtagcttaaatctcaggaggcctgggatgaaacaccacccaggcctggctggacaggaacagacataagcctggagcccaaatgctacttgtggcttttaagagcttggcatgaccccagttaagcaattctggaatccacagaggctctcccttgactcccctctccccacacccactctcctgagaccttcctgcaaaaagcaatgcaggattggcaaccacctcgtgcttcctttttttctgccagccatctgtatttccaaaggaatcaggccccaagtctaaccacagtgctcagtaaatggaggctgctttctgaaccttcaagcggccttacagcaggcagccagctcttcccccctcactacatgaaagagagagaaagcgtgtgtgtgtgtgtgtgtgtgtgtgtgtgtgtgtgtgtgtcctttaaggcaacacaagaagagtctgatgtttggttagatcttactattatattttaaatgtcatcttttagagtctttttttcccggtttctaagattcactttgcctttggatggaaactgtctgctggaaagacagagctgcactgtgaaggagagtgaatctgaggcatgcttaacaacagcaggctcaagtcagggttgtggagcaaggatcagtccccagggtgagtctgaagaggctgcgaaacaccctctatccagctgggagttttggggcttagaatgtttggagatggacccaacatctcgccccaggctcatcattgtatagcaggctttaagtatgtataaatctagttttgggggtcatattttggctcattgggttcctgaatttatgtgttggaagatattttcagtaggtatctgaatgatatgatccctgggaaagttaccctgtgggatggaagctctccaaacaaatgctaccttgttttctttctttggtccttggagtgttctttaaattagttgaagcctataggccttaagctgtgaacaacctgatagacttctgctaatatagtgcaagttagattcaggcacaaatagtacctttgaattgtgagtgtgattaatatttggtgataaacagaagagggctggtagcagcctagcttgtgcatacctggctaccacctgctcatctccttagccacaagaaaggctgctggctttttttcctccatgaaaactctccataatggggcccaagctctggtccccgacaatgcagctgccctggaggaaatcacctgattggtaggtttaaccaacagtccctaggaaaatgcctacctccccacttctccctatcagcacgcctgagccagaccctgcctggagttctgagagtagtaaacatttctctcttttggcctaaagattcttcttctcaccaggcctatggaaaatagcaagaggcaacagagattgctctcattttgctggtcaatgttctttgggagactctactgggttacagcagaggtttcaccggtggtaagaaatatatcaatcctgttaacccaacatatgcacaaacacacggcaaaaaacaatatttaccctaactatgtgatatacaccgatattttctttctatcctgtgctattcaatttgtttaaaatgctgctctccatatactaaactgatttcacaatcctgtgaatgggtccctacccacagctcaaagtttggtagaagaacagaacctgctctaagtagcttccaaattaggagctcaggctttgaccagataaaaacaatgggttctattggattcatttgcaagtatttactgagcacctagtaggtgccgggcactggcacaggtgctgggtatacggagtagaataaagtaaacaaagtgaaagtcaccttttgattcgtaggctgagttcagcagcagaaaaggatgcacttggaaaaaaatcagtatttttaaaaaaagtaatcatgtgtatgtataaaacagaactaataatatttcaggataaaacattatgaatgactcttaaggaaattccagatttggaaattatttctgattcagtatccacttggtgtgcattcacacttggccgtaacagcttcatattctaatcaataacatttagctctctccaccgatatgaatcagagacccttacttcatgagcacacaaatgtgaagtgatttcagctttctcagagaccatttattctgaaataaacatgaatttcattgacattccctttatactgtatgagatcaagtcaatatatacaaatcaggatatgaacaaaatggaccccatagctacaaatggtggggtgaaaatagcaaacagattattaattacaaagagggtttctgctgcacaggcagttcctctgtgtcggcccttgcggctttccctcacgaagcttctcccactctgctcagatggatattcatatcatggagcagagtcctgcagtgtcccctgggagaagccacatgcagggactttaacctatgctacatcatttcaaggctttccacccaagtgcctttgaactgataacattacacggtgcagatctcaagtatcagtgctttgagtcttctgttttatctttaaaaaccatgagagttttgcacaagcctacaaatgaagtccttctacctcactcccaaaattttcaggtgaaatagaggcttatcttgtagcttcccatactcttctgaaatcttctactaacccccatattattcaggccgccaaggcaagaagcgcaggcctgagtaacagctgtcgatatttaccaaagggaggaataccacactcttagctcctgcatccaggtggccctgttgtttcagaggatggagagcaaaggcagccattgttaaattttctgctgtcacctcacgcccagcagttaacggattttcacataccccaatgtttattatgcaatctttttgttccaggcactaaggatttatatttttaaaaacttacataatcctcactgtaacactgtaagctagatagaaacattatcctcattacacaaataagaaaatggaggcataagagaggtcatatatctgggaggaaataggggtcaagctcacttcaggtctgtcccaacagttacactcttaaccacgcttctctgtgcctctgtgaagagctaggaatctgcataaatgccacaaaatggcatgagatgcaaaagaatgtttaattattaattctcttcctaaaattaaattgtaaaaaaaaaatttaagctcatcttcacattctaggtttttataatggtcagtcgcatagaagttaaaacataccagtactcctagggttgaaaactagggttgtctcttaacaatactgcagatgtacaagatcactatagaattagatttaacctgagctttgacgttcaaagtgctcaggtgcaataaactcagactccaaattttcatacctaggtgcccagttttctatagggtgatccaatgtgacccagaggatcaggccttggagatggggtgtgtagcatttactgaagatgagcaggaatcagaaaccattaagttaaatgccctgggcagcatggtctcctgacctatcccatgtatttatactatgtgtgaagcctggactatccaggttatgggcacaaaaaggaaaaagaggaggcctaatttgaccctgacccaccgttgcacctgaaggctttaccatcccttatcagccactgccagtccagtctactggcaccttatgaacagtcactggctcactgcaggtggacaaagacattcccaagcaatagcaaggggataaccaggggcaaagaccaccagcagcccaggagtcacaatactttgacagcccaggctgcccagcgctctttaaccgaccacttctgcaaactgttattcatatccattgtaacaaactctagggctgcccaaagtcaatgtttaaggatatacagcaatcgcctggggtgcttattaaaaaatgcagaatccatagagattctaattcagcagataaaatagaccctgaaatgttttcagtaattgccccagatgacaaagcttcaatgtaggtaaacctttgtctattagttttgtatgaaactgtaatcatccatatatggccctgtcctgacactagactgtaaacaccatgagggttggcactgtttttttctgctttgtatcttcaatgcccaacctaatacctggttcacttaatgaatagtagttgaaactgattgtcccacagagatgaagctctgtgccttgtcctttaggtacagagagtgatacatagcatctgatctaccctggaagactgacaaggctgatcccatctcagcagaatctgaacctggaatatggcagaatactacagcttttgccagagcaaccaggtgaagaacaaaaagtgaatgtgttccatcccctcatgaggcttctgaagctttccttatgatctgattacaacaaaggagagaggcaactgacaacacactagttctgaaacaccgctggcatctttgttatcagccttcctggctcttacagagagatctgctttcagctctccagcaaggaacagacacaaaactttagcctctctcttaataagtccttgatttacttgtctgaaggtaagaggacggtggtggtaggatgagatttttcagggtttggagtggtggctctccagctcttgtgtgtggattactagggtaagcccagaagcaaggagtttgaaaccatcaccacagctgatttagatgaagaggcccccaggccaccgcaggtgaccatcttcataggattatcagctcgaaaccagctgtgccaatttcctgctgggaaacctggagagctgggaaaagcagaaaatttatcaagctctggtaagagtgaactaattgtaactgaaagagtgttggttggacacaggaaaatgtttccttggtgggtttgtgagtacctggaaaatttcaggagtggtagtgtacctacttctctggaatttccttagaaatgggatcctaaaaataggctgagaattagcccataggtccttttcttttttcttaaatcatcttctaagtcactgataaaaattgtatttttattcatttattatttattttggattcaggaggtacatgggcagctttgttacactggtatattgtgtgatgctaaggtttgaggtacaaatggtcccatcacccaagtgtcagcacagtacccaataggtagtttttcagctcacaccccctccctcttctcctagtagtcccctatatgtcctggatatacatattgtcagctctatatttctgccttgtgtgtaattttcatacgtcatattccacccttaaggtgtggagctcttaagggtgggaaaataaaattctgttcattattggcatccttagcctggcattcaaagttccccatgagctgactccaatgtaattacctagtttcatggtttgcttcactgcccaccactgctctacaccctcttgctccctctgacatgtcacttatgtgagcctcccgggactgttatctagctgatacacaccaatataactgcacacgaagggctaaaacattgaaacgttccatgctagtcagcaaacaatggctgtctcagtctccatgaatgcccccatctgctgctctggactctcccctagaatccccaagaggtaacagtaaataaagggttaatgcctggcacagcagggaggcttctaggaccctgctgcagcccagctggggcctacttgtccattttgattgtccaaatattttgaatattatctctggcttccaaattcccaaaacacacatcacattttcactcctctgggcttctgctggcacagtgccctttgctccgaatgtccttctctccaaacttcttgaaacccctctcgtaatccagatctttggttcaaacaatcttctccaggaagtcctccccaatcccaatctcccctctcaaaacaactactccctccaccacagccacaggcattttcttcaaacctttttgtataactcttatcttttgtcttgctttagttatttatacatatgtcccaacagatctacttcccccactgtggaagtttgaagaataggtttaaaggtgaaatgatattgttcaataaatttccagaaaggccgggcgtggtggctcacgactgtaatcctagcactttgggaggctgaggcgggcggatcacctgaggttgggagttcacaaccagcctgaccaacatggagaaaccccatctctactaaaaatacaaaattagctgggcgtggtggcacatgcctgtaatcccagctactcgggaggccgaggcaggagaatcgcttgaacccaggaagcggaggttgcagtgagccgagatcacgccattcattgcactccagcctgggcaacaagagtgaaactccgtctcaaaaaaaaaagccagtcttgggccacgtggcaatctctttaaagctaacatagtcctatatgatgaaatccttcctacgcaaggacatgctttaaccacagatgggcttgaccctcccagcttcttgggtatggtttggaagactacaggagtacattaaaaggtccagcatcagctgagtgcagtgtggctcacacctgtaatcccagcactttgggaggctgaggtgggcagattacttgagctcaggagttccagaccagccaggccaacatggtgaaaccttgtctctactaaaaatacaaaaattagcccagcatgttggtgcacgcctttaatcccagctactcaggaggctgaggcatcaaaatcgcttgaatctgggaggcggaggttgcagtgggctgagatcacaccactgcactccagcctgggcaacagagtggagtgagactgtctctttaaaaaaaaaaaaaaaaaagtccccaaaccaaaaaacatcctatcaaatagtgcctgggacagaggggctggcaacgggcttcctggctgtagtgatggtgtctcttctgacagacaagagctctacgttttctgtgtcaaacccatcttcatctgccatgctgcaggacagacctgctaggcagaggcagccagcagacctgatctgactttagtttcttctcgaaactgccttcctttgtctttttgttttctagcttctcattaccttgcagaggcagcatttcagcaacagactgtagacctcctgaggccagcagcagctcttgctgaccctttcactctccataatagctaatgattatagtattagaaactcatcacgcgctattatatgccaggctttgttcaatgcactcaaccttactaacccataatatcccaactattatcaagtactgttttgtttgtttgagataggatcttgttcttttgcccaggctggagtgcagtggtatcatcacagctcattgcagccttgacttcctgggctcaagtgttctgcccacctcaggctcccaggtagctgggactataggcacgtgccaacacacccagaacatttttgtattttttatagaaacagggtctccccatgttgcccaggctggtcttgaactcatggcctcaaaggatccacccgcttcagcctcccaaagtgttgggattacaggcgtgagccactacacctggcctcaagtaccattattagcttcattttacaaatggggaaaccaaggctgacagtggcaaaatgatctgtggtggggattggcccagctaggcagtctggctccagcatccttgctcttaactgctactcaacatctactgtgtagtaggtgtacaatacaagcctgtcaaatagatggtaagtgtctacagggccttcttggttaaaaggacactactttaagagagatttttataagcacttgacatccccaaacttccccagatgacttgcagctatgttcttatcacatacatactgtacaaccccaaacaccagtcacaggggaagcgccgtgtgactctgcttaagcgtatgtggataatagatataaatgctgtgagtgtttgaagggtctgaggggggaagaaaggcttggaaatagttcagccactttaggacaataaacttttactcattgaagcagagagacgtgtgtgagtgcattcatgcgtgcatgcgtgtgtagggtgagtgatgatcaatggggagcgagctggtggggcatctcttttctttctcctccctgtggtctgacaaagcctgtctgtcttggcttgcaaccattcgtaaagaccccatagcttccactggcctcctgcgcaggagggcagggagcagggagtcattcatcactgtcaggagatgtgctgcacacagcagggcccgctttcttccctgctgctcctgcagctagagctgcaaatcttgaaaagatgcagaacatgcacatagcaaataaccattcatcatctcagctctggaagccccgggagaggcccctccccatgtggggctgacccattctgagttggactccagccccgttggaatttggaacacagggacttttcaggtgcctaatccctggcccagccattctccatcctggataatctattgaggtttggggttaaaattctctgaaatgatcccccctgcccctgtctctacaaggtcagattttcagagtgctttcagcaatcagactgctgccaaggtggcccgtaatcattaaattatgaaaatacaagttgctgagaggaaatgaataccaggtttcactagggaaaggcctgctttcttgtgaagtaattataaaattaaaatgtgatatttctctggtgagtgtaaaaagcctccccatgaggtaggtctgtggcatgacggcaacatcaggatttacactggggtgggactgagagatccttctgtgtccccaaaatgccagagacatctgcaggtaaatttccgaagattgggttaagagtgattaaaagcagaaagagggaaaagtactgagtttgaatttttcaattactctgtaaaactcaagagtcaagctgttcaaaaatgtaggctttctaaggtaggctaataacgctgagctaattagacccacaggcatggccaacacataaatttgggccccaaagagggacactgtccctttaaaaaccgccttgggatccgtggaaaagctaatgaggagtgtcagttggggctgctttattaggtggtcctcaagaggataaagcctggggtttctgtaacagggcttctgtgcttgattcaataaatcaatttatattaaatgcgggcgcagctctggagttggcttcataagcattctgtggcgtttctcaatctgctcatccacttccttgtcagcctgcttgaatgcactgtcagagggcattgaagagagcaataaagaataagatagaagctgtatctatatttgtaaaacccaacctggcagctccagaccatgtgtggaactatctccagtgagtttctctctccagaaagcgtttggatggttggtgagaagcctgatgctgtggggctgtgcttctccaccccaagccaaactccaggctatagatggagaataaaggtcaccccaaacacagtggaaagggttggaagccaagctgcttttaaatcatattctcagggcctgaattactccccaagaaatcaaaggaaaagcaagagggacaagagtgccagcagctggtcctcatccaggagataggggagagagctgaaagaaggctgctgggctgcttgaggaggggaggtgcgctactgactagggctgatgaaatgggtctccctttagtctggccagctggatgcagcttcttggtggcccaaaagtgactactggctatgaagtgagttgttcctaagcacaatgactgatgcccctgaggatcaggaaaggggtgtgaagcccacccctctgctgactcagagtctggcatcagaggcaccagaggccggtgtggctacaccattccctgtccacagttatcagtacccatcccaccttttaaaaaactctttggggccaggtttggtggctcatccctgtaatcccagcgctttgggaggctgaggcaggaggactgcttgagcccaggagtttgagaccagtctaggcaacatggcaaaaccctgtctctacaaaatacacaaaaattagcagggtgtggtgtcacacacctgtagtaccagctactcaagaggctgaggtgggagatcacttgagcccgggaggttgaggctgcagtgagccatggtcatgtgaccgccttccagcctgagtgacagagtgagaccctgtctttaaaaaaaacaaaaaaaacaaaccaaaacaaaaaactctttgctgttgggatgctgagttacagagagctccttgcaccacaccattcccaactatacccacgctcttctactatgtagaccacagcaccatgccgtagaactttctgtgatgatggagacgttctatatctgcatggtccaattcagcagccactagccacatgtggctactgagcaactgagatgtggctagggcaactcgggaaataaatttttaattttatgtaatttagctaatttaaatggccacatgtggctagtggctactgtgctcgagagcacagagaatggaaatttctctttgcctcaataaaagtagaaagtgctgaaaggagaaaatgggctaactccactctgctcccagtggaaaatcccctatttgctcatagttttaagggaaacagaggagggaaaattatcgtgatgtatcatcaagttagaattataaaaagttaggggctctaagggacaaaataaaacactgccatctctggaatctttctaatgggatctgtcttttccagcagctctaaaagcagagcaaagcctaccccctgccgccaccacacttagaggttcgcagcaatggtcagaggaagtatttacgagagacctaggccaggatctgcccaaggccccagaagcttggcagagcaaagtacacaaggtgcctatcgccaaaacaggactctctttaccaagtcaagcatgtgatctcaagttaccagtccagcctgcccctgaaatgagaccatcataacgttagaaaggctttgcttaaaggaagaattctggtatactttgctcatgaccagaaccatctggaagcaatctagcattcacaagatggacttttcttctttggcccttgctctctctacaaatcccatcagcccaggaacagctgctggagaatctggcctggcgccaggggtgaagtttcagccccctcccacacacatgtccctctgggtccctggcttgcttgccaccccaggtggctggacatggcacgaagtacgctgatcctacttgagaaagcggaatagccagtggtcacaggagcagagacttggtgccacaaagcgagctgtgagaaactgctgtttcaactcggtaacatagacacttgccagtaaattatggcctgagacatctcagagggctgcgggtcgggatacactgctctcaaggcaacacaatgccagctacagtgtgcatcctgcaacagcagctcaacacaaagggatggggaggatgggccccagcttggggattctggcaccgggaccaatgacaccatgcgcaggaggtgagagccaagggggtgatagggagagcaagggaagactccatcaggaatgaactcagcactgggggcactgcgaagagaatggctttgtaaatctagccactgtgcaaactatctgaggagagggggaaggggaggtgggggagccagggaagaggccaactgcattatgaaggtcctggtgacaataaccttttgtcctcaaaacaatttgagcctgccaagctgctccacagtctccgtgaaagcatgagggtgggaaaaaaaaggatccccattaagaggcaacagactcatccttaattatgagacaagccttcccagagctgacatcctctcccacacttcctcctgcagcagacacaccactgagtgccggcgtggtgctcctctaatgagagcaggcaatttttctaagaactggtccttttgggatcttccccagaacccccacccccaaatgacacaagctcttagtgagaagtgtgaagcatcagtttaatttgagcaatggtctacagggtcagactggggactagaaaagggacggcctcagcagtcctaaaatgcttcattccatcctcttgaccctataggatcgtcaagacaccagtcctggtggacagagggcccctgcttaaatgtacaccgaagctcgaaactgaatgatcatgtctaattatcctaaagaaaagctgactggcacactgtattagaaagaaccccaacaaaaagtcagaaacctggattctagtccttattctgacacatttgcatcagctgtgtgcaagctgtgtcagaagctgagcaaaccacctaatacctctaggcctcaatttgctcacctgcaaaatgggagtaagggggggtcattccacatttggcagtttagcaccttagtaagcaccacacactctgaagttacgctgcctggattcatatcccactttctcctcttacgagttatgtaaccttgagcaacttagctctgtgcctcagtttcctcatctgtaaaatgtacctagttcacaggactgttttaagcgttaggtatgaggaattaggtaaagctctcatcatagtgtctggcccttagctcttccaataattgtcagccccattaccatgatgattagtggaagatgaggaagaaaaaaaattccacaactaggcatttactacaaggattaaacagctttgcagtaggtggactttttacttgttagaaggtttcagaagaatgggttccaggctagagtgcagtggcataaccatggcttgctgcagtctcaacctcccaggcccaagcaatccttccacctcagcctcctgaggagctgagaccataggcatatgccaccatgcctggctaatttaaaaaaaatttgttatagagatggggtctccttatgttgcccaggctggtcttgaactcctgggcttaagtgatcctcccatctcggcctctcaaagtgctaggattatgggcatcagccaccatgcccagcctcccatctttaagtcctaaaaaataactgctagatctaaggctttctgctagagggtaaaaacattttaaaaaggaattcattaaagttggggggagtgctttacgtaggcagtagtctaaattgaatggatgattgatttactgattcatttatttatttagagatgaggtcttgctctgttgcccaggctggaatgcagtggcatgattctggctcaccgcaccctcgaattcctggactcaactgatcctaccacctatgcctccccaaatgctgggattataggtatgagccactgtgcttggcctaaactggttttcaatttcttaggttcttctgacaaagatgtaaagggcttttcttcaacttaagtcctattttcaaatcaaaagttggaacaggtaggaaatgcacaaagatgcacataaatctgcttgtagccaaggttgtgagccaacagccgtttggggaattaggctgaaaacaaatcagcaaatcacatctgactaaagccattctcagttgtggctccttcattattcattaccttctgtgaagttctatacaattaaaaatagcccatttgtggactgtttatctgcttaggaccatgctaatgcagagagagagagagagagagagagaaagagaaggaaaatgagaaagagaacaagagcaagtgtgcacgcaagagtgaaagaaagtaactgtgtgcatataaagttggatataatctagtccctgaacttagctacattttttttttaattataaaaccaggacaatctttagccattttctaaatattaaaatgtacaagccactaaaaacaaaaacaaaaaacaaaaacaaacaaaacacaaaagcagagcttccagggtttggagaaagaaacataaaaaaactaacctcatcacacattctacttacaaagagaggtttgagtggaacctttacagcctttgaaagcatctggcccattaaagtgacgatgcctattatctcattaggagtgcttttcaaagttagtaacaatgagctgttcttctccccctttgaatcaatactaagcatctgcaacaaagatacttttccttattacaaaatcctaggcagatatttatcatttgttttgactactttagatctaatttgcctttctggcatagaaagaacataggtacagccttgcctcaagctcaatctgctttaaatgtgcacatcaactgtctgcaacattgatctccccacttctgtcaattatacctcctttattcctttcagccaatacataattgctgcctgtttactatgtgtcaggcacaggactaggcactggtgtccccctcaaggagcctacagacttgttaaagagacatatttaaataggcaactggtgctgtcaatgacttaacctcttacctttatcccttggcctaaatcatttagtttcttattcattttcgttccatgttttctgcttctatccctctatttaggcctcgagacctcacataaatgttgttatgatagtttttctctgagtacctgaatctgctttctctcctagtcaatctcattccaacttctcttagaatggccctccaaaaacatcactttcatttatttctctttctcaggaatatataagagcaccccatagcctcccagtaaatctaaacttgtctggcatcccgttttccctatcatgttccctcagtaccagccccatctgtctcccatagtctctcctcttctatttggtcatgttccttgctgtcttttagatctactctttttatgtgtttacaaccatgtgggttcctaacgttccatctttccaaactctacagttcccagactaaaccccatgatgctttgctgaattacactagctctcacattaaacttttcctgtacaagtgctgattttgctaactaaataaaaatggattcacaagaaaacccagtcagggttggtatgatgaccctggggcatcaaaactccagaactcagagctgcaaaggtgaaccctttctgataaatccattcatattttagagcaggggtaaattcttaggcttgagaaccagtctgtgatgcaactacttaattgccctgttgcagtgtgaaggcagtcacagatcaaacaaacaaatgggtgtagctatatttttaaaaattatttctggaagtagatggggtaggcagaatttgactcttaggtcatagtttgctaaccttgttgtagaggaagaagagtggatacaggtgagaaacttctcttggttggcaaaggacaaccagaagccccttggcctcttatcttctctgggtagctcaacttgttccctgaagacagtatgtaccctggcagtagatccctggccaagtcatcaccatgggaatttgggctgtgaccatctgctattgctattttggtcaatggggaagagataagaaaatctacttaatctacttctttgactcttttggagatatggggaagaaagggtccatggtctcattctcatatggtctccagactggcaggaggctcgctcgttaggaccccagggcacaagagcaaatcttcacccacacagtgccaggcactgcgctctcatttaatccttacattaaccctatagtgtataagtacttatcatatctatcagtcagataaaagaaatagctgaggtcttagtcaacattagccactgctccatcctagaaatgttcttgatgcttacacagttgtgttttcggaatacgacaacccccctgacaagagttcttatttcaatttgaatgtgatattaatgagaatagctcattaactttagccttgataatgaatcttcaaaggatatatctttttatcactttatccatggaaaaatgggctctagaggttaagcaatttaaccaactttgctcatttagaagaatcagagtcaggattcaaacccaagtcagtctggctcaataaacctttggccattctacctctttaataaccctgacctaaacacataaagcttcatgtgtttttaaagccctcaaatatttgctacatgtgaagtgagaaatcaggtcagtttcctggggtccaatatccccaaggagggcctcgaagaagcagagaggcaaaccaaggctcgtgatttggtcctaagcaaacatagcagaggcaggtgtacccccttgtcttttaccacaaaccctggtctctggctgtgcttcctgatccaaactgtgtaactggctgtttatggtggtgatgcttccttcacacacactgtgtggttccgaggcagaggaaggcatgttcttaccagcctgtcatattaaagtccctgtagagcatcttctttccaagctcctttctctgtactctccttggaaactccaaatgtgtgaactcatttcccagcaagtgaggctgcatgaatgcctaatagcaaaaagaaaaagaaaaaacacacacatacacgtatttagagaaacaaaataagaatcaaggatgttttgcaaattgagacaggccatattttaaaaacaagaaaattgcctcatattttaagtaaatagatttcagagtttaaacactaatagaagacgagcacataaaaatgaatttacaaaggaatgtaactttttcatttgatctgatacattaattgtaaccaaatgcatagctgaagggatcaggaaaaaagactgagcttctctctaaagaatggctttttagttttccaaatggtatactggtgagatacggggtgagaaagctccctgacgtggtcttttccacactcatctcacttacatccttggttatcacggccttgcctttgaaacctgtgtgtgagcttccatgtaaacacaatggcttgagtgctggttggggctggatgcagcagacaggaactttctgttggactccctccagtttgctctgcagtcatttgatcgtgtcattcgaagactattctggagcagatggcttctccccctcccccaaatctctgttcacactacaaaagtcttgagcaaacagccacttagggaattgctttgaaacaacagtctcattgtcacattcaaaattcaaatctagcaatccgagagacgcaatgctcacgtactaacttctctactcagaggccacatgctgcaagcaggcctgcactagaacttccccacatgaagctgtctacctgcttctgagcagcatggtggaatggatcttctttcttttctggcagggaaaagagtgggcagagcaaatcacagcctggcagtgtaggaaagcaagggatctctgccaccaggcagatggtcaggtcctcagtgtatgggtcataggcatctcttacagctactttgctaggacccaatgccggcggatctctcactgattctcatgaaggtctggaggtattagttagatggtagtcatccaatgctaagtttttcaggaaccaaaggaaggaagctaagttgtcaccaggctggtcatatttgcccagatatggaactctgagcaagtaattctgggcaggcttggggacaggacaggatgggatgagacagggtgactgagggtgagcaggagaactgtgcttcccatttgctgtagcctcaacagtttctaggtctggtgggaattctggatcactttgaggggctctgaaaattctgctgggagtaaggcttggggtgctgatgggtatcaaggaagcttaaatacgaggttttacagagaggttctcctgggaaggaatgaagggaactaacacttaataggtcaggtcaacagtggtgctttgggtgagaagaatttgggtgtgaatccaagctctgctttcataagcaatgtggttttagcaggttatttaatttcttgggcctcagtttatctgtaaatgagattaattatatatcccacactgctgttttcataatgtaatgtctattaatatacttagttgtttctgcttacaaaaaattattatagtcacctagtgattattgaatcctattatatcctgagtactacactcagtgctttgagagttctaatttcaccctcttaacaatcttctggacaacactggctacatcatttgtggggcccggtgaaaaacagaaacagggagcctgtgttcaaaatcaagaatttcaagacagggacagcagagcattaaactaagcagagcactaaactaagcacggcaccctccgcgaccgcacaagtcacaggcccatgaagctcgtcatgcctactgggtacatactattttattctttttattttagtccgcccatgaaaactaaggaacaaaggcataagtggtcaacggacagcaccatctgttataagccctttatgatctttcagaactttcagattgtatcagcatgaatacaatccactacccaagctggactaacatgggcttaggggttaccatgtgccagccccataccaggtacttcatacacctgatcttactccccaacaattttacaaagcaggagtcgatttgatttacaaatgagaacactacatcctggagaggttaagacctagcccgaggtcattcgcccaagactgggtggatcttgagcctgagcttaatatcatggttataaccctcatcctaaccatattttgggcctttaacctacacacacatttttacaaaagatagtaaaggggccataagaggcctgtgatcctttgcacttagaccaagcaaagtctgaatcagtaaaccttgttaaaagaactcacacacacagagccacacacagtatgggcacaaaaatgtctctgacattatttataacattaaataactagaagaaatcattgaatgaataactcattaaataaactagcataaacccaaacaaaagaattctatggtgtcacttacaatgacactacagagaatatgcaatgacacagagttgcgttaagtgtaaaaaagcaggtcatcaaacaatatgtgtgtgtgcatgaacttgtgagtgctgggtcatatatgcacagatctttatagaagacatacatacgtacacagatgctcctctgcttacagtggggttacatcccagtaaacccattgtaacctgaaaatattgtaagtcaaaatgcatctcatacaactagcctactgatcagagcttagcctggcctaccttaaatgtgctcagaacacttacattagcctacagttgggcaaaatcatctggcaacacagtccactgtaaagtgtaggttgtttaccctcatgattgggtggctgactaggagctgctggctcactgccaccgtccagcatcacaagagagtatcataccacatatccctagcctggaaaaaggtcaaaattcaaaatcaatttgaagtatgatttctaccaaatgcatattgctttcacaatatcagaaagttaaaaaaaaaaaagtagcggtgctttcattctgctttgtaaaatgaaggctgccctgattaaaaaaaaaaagtaagttgggaaccatctgtttacaaatgaacatgttatggtctgaatgtgtctcctaaaattcatgtgttggcaatttaacccctaatgcaacaatgttgggaggcagactttttgggaggtgtttaggccatgaaggtagagccctcgtgaattaatgctgctatagaaaagggcttgtgagagtgagttcactctcttgcccttccaccttctgccatgtgaaaacagagcaagaaagcccttaccagatgctagtgtcttgatcttggggcttcccagaccccagaactgtgataaattttgttctttataaattactcagtttgtagtattgttatagcagcaccagacagactaaggctgtgtgtgtgtgtaaatacagatacgtggcatgcatatatattattaacaaacaggtaagaatccaaacgacattcctgagcacatttcttaacaaaccccatgtctaagaaggtgatgcatgttcaggacacactacctccaatcacagtacctgggcatttgagggaacaggagaagcagcccatagaaactaggaagaattccccttactcctcctctaaagcaagccatgagacctagctcaccttccccagaaaatagatcattaagacccgattccagaggggccctgcaccatacccagaggaaagaaatatcacacagggatgccaagatgatgctgaacaaacaggccttgctaagtacccctacccctgagtttattaccattagatcttttgtcctttgatcaaacttctgtatgactgtccctaaaaatacagtttgccctgtttccttggggctttctgaagacatctatgtgacataagcttatattaaatcaatttgtttgcttttctcttgttaatctgtcttttgttataggggcatcagccatgaatgggtaagaaatctcttctcccacataagggtaagtgtggagatttcaggcgctttgcctcctaacaggaggatgagtgggccctttgatggtgctttaaaccagggacccttgggctctttttggctgatatccatttgcctgggtggctgcgtcagaagatctgttgaggcagatgtctgtgggttagttgggaactcctcaacagctttgataactgcaggggccacctaccctctccctctgaggatgtgcaggtttgaaagggccttaaatattgtgtcactctgaggcgccttcacacacagagcctttcatgatttccacaaactgcttgctttcttccaggataacaacagggtatgatatttcatcaaacatatatgccattagacgcaccatcattttattacttccaggaagaaaaaaagcagccaattaaaatatgtataattctttcttaacacttcaaattttaattttatccttttcataagagctgagacttagacacatttttattatctatcactattgtatatatttaataagggatatagaattgaagtaggttggctaaggtttccaaaacttttacatttagaatccaactgctctcatcatttttcaactctgaatcatgtatgttcataattttccacacagaagtgttgtgtgtttcatgagagcaccggtgacgcagcattttttaattaatccacaacagcactggaagcctcaaagctaagggtgcagaagttcttaagccagctttgcaatcctctagagccagcttacttctgactcccacttcaggaatgtggctaagcaagtctgagtcacacctcctcaaactcctccgcacaattagttggatccagtgatgcttaacaagcccttcacttttctctgcaggatgttcttccaagctgctggacacccatcccacaaaagtttggtgtgttgggactcaggacattctaccccaaaaaatggcaccttggcatttgaggaaacagcagaaacaggaaagtctctcaacttccccttgtccctctcccctgaagcaggtcacaggatcctcattccagaggtgcccgccccatatccagaggaaagaaacatctttaactctgaagacacagggatacagaagaatctgaacaaacagccttgctaaattctccccagtttattcccattagatcacacccactttatccaattatatttctccatgactgtccagtcttcctcaaacttaagcataaaaatatacaaagtttacctatttctttaggtcttcaatttctcataaagtctcctgtgtcatgtaaaacttatattaaatagatttgtatgcttttctcttgtttatcttgtcttttcttatgggggaccttgtgatgggtgaggaaatcttttccgcccctgcaggtgtctgcccttttgatgttcacatatgtccaggagatgacatgtcatgcctgtcccctggctggcagcaaaaatcaaatataaaattcagatatgttaaaaaaaaacaaagacgtgtcttagttctgaggaaatactgtcatagtcacccccccactgatactgatgccacactcttagatttctccatccttctgatttttcttcctctgttgctaactgacacagcacaggtggcatgattcattttctgtcataatcatgcttaccatagaaattataagtactccttgtgtacctgtgatatatttttaccactctctcttttttaaaaaatcaccacccacctccttgccaccacattcaatacttactgctgttgcatatgtcaaaccctatggagttaatggcattaaaggaactcttctcaagaacttggtacaaacagagcaaacatatggttgcttaatgaaaaatgagatgctaaaatacatggctgcacacaatttgtaaaaacctgttggttttcagaggaaaacacttacggttattagtctatctttttgtgcaatcataaaagtttatatagtcttatatgcacacatgtttacacatgtacagtcatcaaaatatttaaaaaagttatctgagggttttctttttaatgtatccataattgtggatattttgaccattggacacagattactttcatttgaaaaaaaaaaccctctaaaaattagttttttgagaacccagtgtttaaagcaagttttaaaagactgctgagaagagcgttactgcttcttgttctaataattttagggaaagccaaaatcctggagaagaggcaagcagagcaggggcctggctccaatgcggggatgtggaagccgcagattcccatcaggccagcgcagagatgttttgtccgcaaacgcagagtggccaaacaacttggtgatttggaaacttcttagggcctgcccagaattcaggtgaccatgactggctagaattacttcatttgtactggtctgtgcctctggaagcattgctcaagtcagcattctggagtcctgagtcttcaaaatgattttactttggatttaccataagcaataagcccaaagtctgtaaagtgttggggcaggaatttgctagtttgctaataatttactgactttttttttttgagacagagtttcactcttgtcacccaggctgtaatgcaatggcttgatcttggctcactgcaacctccgcctcctgggttcaagcaattctcctgcctcagcctcctgagtagctaggattacaggcgcccgctaccatgcccagcaaatttttgtatttttagtagagacagggtttcaccaggctggtctagaactcctaatctcaggtgattcacctgcctcagcctcccaaagtgctgggattacagccatgagccaccatgcccggccatgtgtccatcatttttaaaaccttaactccactccagtgcccagcatagcacccaacatagtaaaggtgctgagtaagtatttgctaaaagaatgaatacaggacattctgacctgctctacacaatcacaacatagtgattatttaaactataagataacacagccttcaatcttttgaaaaagttaaaagtaaggcccatattgtataaaaaccatcttggacccacgtagtttggatttagttaacttcttataaattgatagatgtcttcccataaaaacacatgtgcatggctgcatgtggtttttaaaaccccatgatgttattttacaatcctaagaatacctaaataataatgctttgtctcttcacttaataagcctgcagatgagaaacctataaattagcagttgatattaaaatgcaaatattattattattattattattattattattattattatttgaggtggattctcactctgttgcccaggccggaatgcagtgatgcaatcttggctcactgcaatgtctgcctcccaggttcaagtgattctcccacctcagcctcctgagtagctgggactacatgcgtgcgccaccatgcccggctaattttggtatttttagtagagacggggtttcaccatgttggccaggctggtcttgacctccagacctcaggtgatccattcccctcagcctcccaaagtgctgggattacaggcatgagccaccacgcccagccttaaaatgcaatttaaagtgtaccagcccaccctccgattaaaaaaaaaggatctcttcttgtacctccattttaatcctaaattttgaggttttccttcaaggaaacataacagaatgctactaaatgaggggagagggcggaggtataccccaagttcatgtgtgtgccacaaatatcacctgggggaaaaagcttgataacctctgccctagcaagaccaaatgcaagtaaccaagactcttagggactctaaagagcacagatttgttaaagagaatacgacatatcctcatcacttagtgatctgagcagctaaaaaaaggaaacttacaaacatggttatatctggccaggaacaaggacacctctcaggaaaggatgctggaacaactgactgtgtcagggcaggacaccagagtttgagtaggggaattggatgtctttctatggccactctcctctctagtcctgagcagaaactggtttcaaaggaagagaagggagatgagcattgcactgtggaaaaatacaacaactccatcccaaagaaagtctctgagtaccctgaagaatggagacataacaggagggaacaagcctgaagaagaggcaccttccagaaccttccagtaagcctctcactaggcaagagggaggccagaagtctagagtaggtgagcaacctgcacccaaggctgtctcactctagatcacatggccctgagctccaccttcctgggctcagggagagtttcgagcacctcagcagggcaaggaaaaaagggtagccggaagcagggaactcagaccccagggagggaagctagccctggttatgggagaagtctaaggtgaccagggctccagcggagggctgagcaccagcctgccagtggacacaaagatggggctttgaggttactcaaaattgcttgctagggaatacaaaatgcttcctcattttcttcctccttttgataatttttttttcctgttgctttgtggtcagctggccagtgagtagtgtcagccaagaaggagactgtcccagggcttggggtatccagacaaaggaattcatgcaactaacatttgagcccttacatatgctaagtaccagggactaggggtttggggctcaaagaacacaaaaagaggaccctctgctcagagctgacccacacaagtgaaggaggctgagggcggcttacgggcagaaatggagccattcacagggaccaaggaacagagtgggtcacacactgaagaggatcagagagaatctgcaaaggagcttaagagttggtcaggcaagagctctagggcaagtgtggccacagcaaaggcagggaagtgggagagagcatggcatttggaggtaatcctaggagagaagagagtggggcagagaggaggcaggagtgcagacattggcaccaaagatggcccctcctgcaaagggtaatgtgcagttaaagaaaggatacatggagttaaataaagtgaaactacttaaacttttcagtgaattatatgtggtaaagtgctcttctcatacgcatacaagctgatgaagtttcacaaattgaacacacctgtgtagctggcctcccgatcaagaaagaacattaccagcatcctgggaccagcaccccatcatcagcaccccatccaatcactgtcactgccccaaaggggcactattccaacttcaagactggccttgcctgtttctgtgcttcatctgaaatcctacaggatgccctctttgctgggtattaagtctgcgaaattcatccatgttgtgtgtaactgcgacttgctcattctccgtgctgtatgttaattccatcctgtgattatttcattatttatttacccattctactttccaggggcattcagataagccatcatatcccctgtgacctgcacgtacacatccagatggccggttcctgccttaactgatgacatttcaccacaaaagaagtgaaaatggcctgttcctgccttaactgatgacatggtcttgtgaaattccttctcctggctcatcctggctcaaaagctcccctactgagcaccctgtgacccccactctgcccgccagagaacaacccccctttgactgtaattttcctttacctacccgaatcctataaaacggccccacccctatctccctttgctgactctcttttcggactcagcccacctgcatccaggtgaaataaacagctttattgctcacacaaagcctgtttggtggtctcttcacatggaggcacatggaagtttcccgtttaagctgttacaaacagtgctgctatgcacgctctggtctttgggtaaacattcatacgcatttctgttaggtacacacttaggagtaacactgctggaccacagcactttcaacttcagggagactgccaaactctttttcaaaggagttgttccaatttccaccctcatcagcagaatgtggaaaataagaatactcatgtgttaaataagataaatgagatggcagattccacgacagaaaatcttttgtaaagttctctgactaaaactagaatcctctacctaaaacttatacattaattaattttttaaatgttcagacctcacagcatttgagagaaagtaatcaaaatacgaattttccgtgtacaatacaaaactttttttttttaattgagtaatctctcctttttcttgcccttagaaggggaaaatctcctcagattatatgagaagaggattggaagccttgcaattcaagatgatttatcaagatagaaagtctaaggtcaagaatgaaatgaaattaataatgtcagccaaaccactggtgatcactaacagtcacgctaacagtcaaatgagacagcttttccagagccaaggctggctgcctgatttacagtgcaggaatagaatattttggtttgggttagaaaaaatgtgaaatggctgagacccaaatatgtataggttggattctttcataaagaactctgttcttaatttgttgtcaaaaatctcaaagtaacaagaaccgagcttgtatatataagctattacagaactgaatacgaataaaattctgcctggtttatgaagattttaagagaagttcacatttaaatttctacgtgatccaggggacctattgtaaacagaaaaaaatgccacaatagcttctagtctgccattttataattagaaaatttgaacctcatatgccattttatgaaaggaggttaaatgaggaagtaggtgggactggagtggatttttttatgactcagacattctcccagggagcaaaacacggagatattgaaactgtctctttctgaataaagccaggcttgctggctttagccacctgctctcaaggttaggtgggatgccaaggtggtgcacctgtcattttgacccaccagcacgcttgaacctccccacttatagcctcctgtcttcaaagcaggttcaggcttaaggaatacttttctgcagacaactcttgagcaggaaaaatcccagagagccaagcagcaccagggaaacagcagacaaacagaacccggctcggcgttgagagctgggggtagttccaaggacattgcaagaaatcacctcagataatgttgcacttgtgttcatcaaatatgtacttgaaacccacgttcatctcttctatacattgcccttgatgaaaaacagctgcaaacttggattattctgcaaggacagaagtatgttatttgaagatatgatgacaccggcacgacttaatgtaatcaagtcagagtttataaatatgtaccggcagaatggagggaaaaccatcactctcatacctcagggctatggatgtctcctgagggagatccatttctggctgtgacctgaagcaaaggtaggggtgatttccttgaggccacagtatcagaacagtaaaatctgttgtgaaatgtccatcaaccagacacccttccctcctatctgagccttgactccaccaaaacattctgtccagcttggtgaagccccttaaatattttatttcaatcaccatggagaccttagaaacaaaacccagcaacagaagagcaagggttagtcacgactgcagatcatcagctctccctggtgctgaggcaggagtgcccgtcccttgaactcctcatcacacacctgccacattccgtgtgaacatgtcaaaccctcaagcctgctcaattaatcaccctgcctgagaatctatgaaacaaagttcacattacccagagagccacatgaagggccctctgaggtcagaatgcaagaccaaacaaaattaatgtgcctgccacatccatcatcttgtaatctgcttccagttccataatccccgaatgtccagactgtgcataccaagaacactgaacattcctctttgatgtggatcaaaatggttcatgtagaaaggactctgaccaccttcttcactagcaagaaaagcatttaccatttctacaagtcaaacagacctgggactgcagacatctgctcaatgcaagtggctagggacccagaagtttttttttgttttcggttttttttttttttgagacagagtctctctctgtcacccaggctggagtgcagtggtgcgatctcagctcactgcaagttctgcctcccgggttcacgccattctcctgcctcagcctcccgagtagctgggactacaggcgcccgccactacgcccggctaatttttttgtatttttagtagggacggggtttcaccgtgttagccaggatggggacccagaagttttaatgactctatcatagatgtttcttcatataccctaaatataaaatttgatttaccctaagaacaaggaatacactgttaatttttcagtgactaataactgatgaggccacgttaaggaagatgatacaactatcattgtactaaactattttgtaatcattcaagggaatgaatgcttaaaataatgaatcagtaggattacacgcacttaaaattataacacagtatactgtattttatattaccatgcagttacttttcgttttaatttctgagcatgttatgagtacctaaaaggaagtattgctacccgtttcattcaggaagaaaggagattcagagacagagtgtgaggggaaactagaggtcaaatgactcatgactgggctgggctgggagaaatccacatcacactcctattttcctctcatagttgatactattttctccacccccctccctgccaagatggagtcttgctctgttgcccaggctggagttgcagtggcacaatctcggcttactgcaacctccgcctcccaggttcaagcaattctcctgcctcagcctcttgagtagcagggattagaggcgcgtgccaccatacccagctgattttttttggtatttttagtagagatggggtttcaccatgttggccaggctggtctcgaactcctgaccttgtgatctgcccaccttggcctctcaaagtgctaggattacaggtgtgagccaccatgcctggccgatactattttcaagattttacactattaatctctaattccctcaagtatttaccataaagatttcaccataagattattttatgctatgaatattctaactcagggtattttatgttctgagtatttaaactcctgatgtctgaggagaaatgtttttagttataaactagagtaacccatttgatttaggagtaaggattaaaaaggatatgggcagcattttcaccttttaaaaattcagacattaggttcggttctgtggactaatagtgtccacactgattgtttaagggcgacaccaaattatgcattaatcttagcaacgttagaaatggttcttaaataaaaacgaggaaaaaaattaccctggtttgcaggccagtgggatctttgctaccgactgaatgtatctccccaaaactcacatgttgaagccaaatccccagtgtgatggcatttagatgtggggcctttgggaagtgattaggtcatgagggtagagccctcataaatgggattagagcccttataaaagaggctccagggagcatccttgtgccttctgccacatgaattttttttttttttttaaagaaaataaaaaaaaaagacggctgcctacaaatcaggaagtagagccctcaccagaccttgactctaccagcaccttgatgttggacttcccagcctctacatctgtgagaaattaattctgttgtttattaactacccagtttatggttttttgctacagcagcccaaacagatgaagacagatttgtagtggtaagactttaattcctcatacaatagctaaatgagtagtactttctgtcacaaaacagtacggcatgtattagtccttacacagacttctgaagttttctatcccattactgttgaagaaattgggagtcactgaagttccttgtggaaattacatacacttacgtgagatctgaagccacatgcatcttatttcaaccatcccaaaatataccgctgacatttgggaatctgaaaatgtcagcattcctatacttcccccaaccaagttaacctcccaggtccattcttgtaacatgaaaagatgaaatcattttaaaacagaaagtgcaaaaagttaacttattattcattgcctcttgtaggaaaacagaaacctgaataggaaatgggtttcaataaagagcaggaggtgggctgtgcatagtggctcacgcttgtaacccccagcaatttgggaggctgaggtgagaggattgcttgagcccaggagtttaagaccagccctggcaagacagtgagacccccccatctctacaaaagaaaaaaataattagccaggcacggtggtgcacctgtagtcctagctaaacagaggctgaggtaggaggatttgttgggcctaggaggttgaggccacagtgagccatggttgtgctactacagtttagactggacgacagagtgaaaccctgtctcaaaacaaaaaacaaaaaaacaacggaaggtgaggataggatataatagaggcaaggaaggcaaaggcttcataccctgctgtgaaatgtttgggcggagggcagaagagaaaggactgtttggtaatgatctagaagtcaatatgaatattgtttttaattttttttttcttttttttaaagagacaaggtctcactctttacctaggctgccccaagagtgcagtggtgcagtctcggttcactgcaacctctgccttctgggctcaagtgatcctcccacttcggcctcctgagtagctgggactacaggcacacatcaccatgcctggctaatttttttttggatttgttttgtagagacagcattttgccatgttgcccagactggtcttgaactcctgggctcaagcgatcctcccacctcagccttccaaagtgctgggattacaggcatgagccaccgtgcccagcctgtttttaaatctttcgttcagtaaacagatactggttctatatctcccttgtgccaggtgctgtgttgaatactggcaatatgaggtgactaaggtaagtggcctgccctccagaacacagtctgaagagggggagagaccagaacaagcaacaccatatgctgagagccacactgcagggatctggaagctgtggtacaagcactggggactgactccctaggaggattaggggacactttgcagaagaagtgatatttgtgctggagtcttaaagaatgaagaggagttctcctaacagaaaagaaagaaaaggccatccaggcagaccatacttccaaaggcatgggggtcagagatcagagaaatcatgatatgtcctggaaatggaaggtagttctctgtggctggagcatgggatgcctggtggcagtggtggtggtggcaacattgagataggactggagatgtgggcaggggccaggattccagcaaggccaagaagggcggtctgcattctgtaaattgcagggagccaaaggcttttagataggggagtgacaaggtgggtaatgaggtcacttggatagccttgtggaatagagtggagaaagccagacaggtggcagagaggctagctataacgaattctacttggagggatccttgcagctcagaggcccttggtggccctatcgtccagctctccatttcacaagtgataaaccgaggtcaggaaaggttaagaaacttgcacaaaactgtccagctggtaacacagctggggccagaatgaagatctgaaggctgcagtggggtcctttccaccggcctagactaccaaagaaaatgacgaggtctgaagcctggattccctagtagtggtttcaagtttatcagcttaagacaccaccacaaaggttagaaagcaacagtaggtgaaagattgaagtactgtttttacagtcattttggattcctgctgtcttatacaccaaataagtagttaaagtgacacagttcatagaataaaatgaatgaaaacacagacatggaaatggaaggaaagtgcagagctgctttctaaatcaaccaaattaattaaatcctgaccacaaatactgaaatgcagagatgcaaagtcctttttgagtagcctggatcaattgtttcctaagagcagatgggcactactttagctgtgttgtctacaaagaaatccagttggcgagaaaatatttcatccacagaactatgattcacagggttagttcctagaggtatctgccccaaggccacctgggatgattaccagagtcactttaaaccaagattctaagcctaatacccttgcccctggaatttgaagacaaggaagtgagtctattctgtttcccagaaaactgagcccgctcataatttcattccaaagagaataatctacatagagaacttattttcaggatagaaacagattttctgacacctgcaccttttccaaagggcctgtaagacttcatatctgagcatgaagtagtggcatgtcagcagagacctcagagctgccacgtgggcagattcttcctcacaacgggaatcagaccaagttccctgtttgagttaaagtgagtagcgggccatggaagaaggtatctgtgtttttcaaaactgcatttcacattgtacataagaagccattaaaaaaaaaaaaaaacaaaaaaaacaaaaccagagcacaccatgtcttcaattggtcacagatgggagaaaatcagccgcaataataaattcacggaggtggagtgtgtcgtcacacacggagccaggatgtgtgatccagaaggtgtgtgtgggggagttaataccatatgtcatttgaatgcggtgagcctgctcccatgtcagtagcaacgtgttcctccagaacagctccgatgccatccctgatgccactgccctctgccaagcctagatgactcttaccaggtactgaagtcgctggcgctccgtctcgggggtaaattctgaagacatggggataatttctccatttctgatgattatggccctgaaatggtgaaaatgcattgtcagtagccaatctcataaatgctctgattctgttacaaccattgcttggttcaggtcacacatgaaatgccaagagatgtttttgttttcccacttgcatggcagagttcactgttcccagctctgaatccctcaccacatgagaggcatctctcttttaagtgcattgcattctagttagcttatgtttatgttttctgctagctggaagtgtgccttaatgctccagccccaaccatacttcttggcacataacaaatgctcagtgaataaatggacggatggatgaatgaatgagtgatgcaacagagtcttgctctagcccagggttatcgaatagcaccttttgtgatcatggtaatgtttttgtttgtgcagtccaatatggcaggcactaaccacatgcgggtactaggcacttaaattgtggttagtgcaggcaaggaactgaatttttcgttttattgaagtttaatgaacttagctttaaatttaagcggtcacatatggctagtgttgaatgtatttgacagtgcagctctagatccctgttactccaatgatgctgtgggccagcagcattggcttcacctgggagcttgttagaaatgcagaatctcaggttccaccctgagattactgcatcaaaatctgcattgtaataagatcccctggtgattcataagcacagggatgtctgagaatgtgtggcctacactgttgaatttctagggtgatatcctgggtccagggggaaaaaaaaaaccaaaaccactcatctcaaggctcaggaaactcatacactccaaaaagtgtatctaagagctattgcccagtcaaggacttttgagggaacggcgttccccaaagcagatgtctataggagaggctgcaggatcgataaccatgagcaacctttcctgggtctattcccagcggtgcctcctgttcccagaccttctgattccaaagtggttcctgacagccacttttcagctatcgatcggttgtggcagaatgttgccatttctacaacaaatggaagtggcttggggaattgcattctatatgaacccaacagctcccaggcatcagggagctagagacctgagacctgacatgcttctcagtgaggagccaccaacatgggaaatgccttcgatcagctcagatctgagtggatgcctccttcattctagggaggctgcattctttgtgccaagaagcctctgggcatccctctctcccagtgcagaggcagttcctgacttggaaacaatccctataaatggctgcagctgtcatgaccccacccccaacccctcaccacctgtgccctagttgctgctgtcatagaaacgggaaagtggggggtcggggcgggggcggcggaggggcgggcagcgcatccaggaagggaaggagtgatgacaaaaatcttaggggttttagagaacttatgactctaggaaaaaaaaaaacagtggaagctgtgagaaaatggaaaagtttaggggaactgactgtgagaagatgaggcctcttataatactccttatcacttttattatgctgtctgaaatatgacaagttaaagattccttcttataaacaggagccacttgtcaaatgcaatcactattaccccacccccactaaggtgttatccaccattcacaaatcagtgtgaattaattccaatggtctttgttctaattaccaggtgagtatgactataacaagggagtaggagttttgacaggatggagaaacacaggagaatttgaaagggggcggggtcaggaaattctaggtttgggcctaatcttacaggatctagagggcccctgagaattcggggagctggagtgaaagttattatgtgataaattccaaagataatctcctctttcaagattttgcctaaagctactcttaactttttcctctttttctgcacggcccctgaattgcagttgaattcccaggcatggactaggaagagccagcgatgcccaatcaggccatggaagcatctcctctaggacctgagtgccaggagctcaggggcctggtaacgccaaaggcttaggtcatgcctgtcacaaagcaggggcccagtgaatgtttgctgattaaaggagcagatgaaagaacttagaagaaactgttccttgaatttgaggcccgaagagaaaagaactaaaaggcagcagatgttcacttaaccaagtcacacggggtagattttacagaggaaagaggggccttcagctagacactcactgctcctcagctatcttttcctcttctcttcctgaccggagctcctctctgtcacttcccacacctcggggttctcccaatgtcagttactcccactcctgtatttctgacctctctttccactggatctctgcccatagaacaaaaccatgctaaagcattctgtttaaaatcaaagtaaaaccaaaaccaaacagatgatactctcctaatccgaactccacctttgaaatgtccttttttctttcctaagaacctaagcctcagaaattgataataatctacattcagggtctatctactccctcgcctcccatggatccctcaaacagaggtaaattaacttcttgcctccctctacacccagctactgtcacctgagtcaacaaatggcccttttgttgctacatcccttgggcatgccatcattctgatctcccaggcagcatctgactgtctcctaaccctggcaccagggatacaacttcttctcctggtttccctcctaacttccgggacattctctctccaacttctccgtcccttctttgctgttgtggactaggattctgtctcagtattctccctgggtgctctcattccctaaattctcagccaccaaggttaggttaggttagacccctatccctccatacgtgttcccttagcctggtccctctcttaatacagaactcatcacattttataattgattacttaactgtctgctttccacgctagcctgtaagctggacaagaaccatgcctgtcttgatcgacactgcagccctactactgcacacggtgccaggccattgtaggcagggctatgtaacttcagggtccagcgcaaaatgaaaacacaggcccctgattaaaaaatgcagaatttcaagacagccacagcagagcattacaccaaatgtgaagtccttcggagagcagggccctgtgtggtgcacaggttgcatgctcacaaagatagccctgagtgtatactcttaatatctgctgcatggataaatagctccaacaacgacatatgctggtgagtccagacaacctttctagcccacatatctctgttgtgctcggcctggaacagccaactgccaacggatatatccacttcgatatattcactggcatttcatacttaataaggttcaaaattaatgatcctgtccccagccccctcccaaatctgtcttctagcattctctatctccgggaaccaaacaattttccacctagttgctcgtcccagaagacaggcagccattctagactcctcccttttctcaccccatatgtccaaataggcacccaggcgtgtagatttcacctcctcagcagcacaggaatccctctctttccttgattcctgctagtgccttggttctggtttccatcagagcttacctgcatgactcaggagctctccactgcttcctcagcccctgttctgccctcctctgccccgtgcttcatagggtcacaaaggtgatgttaaagcaccgctctcatcatgccacatgtcttaccgaaagccctgtgatggcttcccagcttttccagtttcctttattatctggttcttgcctgtatttcttgctttagcctcactcttgctactcccttcacatggcttcttccttctcatggttagcccatttctctgagtcagctcagaacgccttctgttgtcctcctggcctaccctccatgccccttctctgtgaccccgtggtgtctatgcctagctgtacccttaccagtccttgctatgactgctggcttccatggctgtcttgaactaccccgcggatattttccaggcagagtctatgttgttgtctctgaatctccagtgctcagtgcctggcacgtgccagacgtgcaacaattgcttgctgatggataagtggctaaatagatgaagggggagctggacttgagtggaggaacagaagaatccagaaatgagggccctacataagacttttcttagtagcaatattatataacttatagtctgagcccttaaaaatccatacgcctttttgttggttttgcaaaaagacggcaggcctaagaggacagtgttctggctgagttgccaccgagaagctccttgaaatacaaagggaaacaaggcagtgcctctctccttagtgggcaaggcagggagggggcagcaatggtagcagctcaccatgtttactttgttttttaatttcaaattcacacacaatgaggtatctgcgttccattacaatatgactgccagggcaagcctagtttattactttcttaaatagataattatatccaaatccatctatgtacagaacattttttcacttccgtttgaactaccaagctcttcctttaagaggcatccatggattaaagatgacagcatgttcgactgccaaccttcccagtgcctacatcacgatgcctcttcctatgtgatccttggcttccttttgatctttctctctttcatcactctgatcttgggatcaatttgtcagagtgctggtctccaatctggagtagggcaatgagacgaaaggggtttcaaacggaacgaaatgcatgtgaaagctgacaaacctcatactaaacaatcaataaagtagagaaatgcctttaaagctacagtctgtcatcacaggacccctgtacttcctagcttctatttcattattttatgagatgcttttcctaaggaaaattaagaaaaaaacaaaaaccaaatgccgtggctgcgagggtgcaggagagctacgtatacactctgaccttccttctggggcctcaggcctggacttgtggataccaccatgaccagaatctgagtaacattccagaggttaaacgagaaagttgccggggttgaggtgatttaatccattggcaatcacctcccacccaataaccattcccatacagaggggatgggttttcagcatattatccaatattaaggttagcctttcctttaaagactacagctgaaatttatatgacattaattccagtaaaatcgatggggcgttatttgcgatacaatgaacagtaaggtttagggtgttcttatgagtcaaccgcaagaatgggagaaaaggaggtaaagcaaggacattaatagtttaaaaaactcaggccgggcgcagtggctcatgtctgtaattccagcactttgggaggccaagggggatggatcacttgagatcaggagtttgagacaagcctggccaacatggtgaaaccccatctctactaaaaaaatacaaaaattagctgggtgtggtggcaggcgcctgtagtcacagctacttgggaggctgaggcaggagaattgcttgaacctgggaaggggaggttgcagtgagccgaaactgcaccactgcacgccagcctaggcaacagattgagaccctgtctcaaaaacaaaaacaaaactccccctggtccctgccccaaatattagctacatgagaggataaaggtaatttattcctaaccaatgagaattttgagttacagactaattcctagaaaatcccgctacttctctcctctaatgttatattttggagttaaaaacacatatctttattcccctagtctaaatattaagtggttaagagaaacagggagggtaaaacaggatggtcacttcgaatattaacttgattttacaatttttcttaaagggatcatattaactcttgttaaatctcaactcagtgtgatgttctcagagcaggactgacatgtgccaacaggtatttaacaaacaagcagaagaaaaaaagctgataaaaaatatgattaggcaactgacagaaggaaaaatgcaacgattaataaagatatgaaaagatgctcaatctcactagtccatgaaaatgcacactaaagtaaaagcaatatataattctgctcattaggttgggaaacattaaaaaaacaacaatatatagttttcatagagtaaaagtcactttcataatgggaatggaaattgttacaccttttacattgattacaattataattacatatccaatggttcagtcattccacttttgggaatacatgctaaagaaataaaagactcagtacataggatatacatacaattcagacttttgacgttattcattggggcaaagactggaaacagcctgaatgtctgtcaaaaggggaactgttgaatggattggtttgtattctataagccattatacagtcataaaaaaaaaaaaaaaaaaaaaaggccaggcgctgtggctcacacctgtaatcccagcactttgggaggccgaggtgagtggatcacttgaggtcaggagttcaagaccagcctggccaacatggtgaaaacctgtctctattcaaagtataaaaattagctgggcgtggtggtgggtgcctataatcccagctacttgggaggatgaggcaggagaattgcttgaacccaggaggcacaggttgcagtgagccgaggttgcaccactgcactccagcctgggcaacagagtgagactctgtctcaaaaaaaaaaaaaaaaaggagtgaaattctattttgtgacctggagttatccatgatatagtaagtgagaaaagtaaactgcagagtaatgggtggtacaatcccatttttgtaaaaacaaaaactatatatagatattccatctatgtgaggagtctgattccatgcccgaatcctgtgtgcaatgtttcaggcctgaccacaggccattacaaaggctctgcccagcaggcctcacgggggaagctgccctctccacaccggatgtggtgcacagtccctgcactgcagccgccaggacagctgcagcccaggactcataccccactagcctaggagtctccactgagacacttctctgctctgactcagtcttcttatagtccttccccttctctccctggccctacaaccctcggtccacaaaatggcaaagcctttagttcagagctctgggcagtgagactccctcctgccagcgctgcatgtcatctgccagaccttcacctggtgccgtcctatggggaaaaatggaagagcactttcctctttgcctcttgccaggactactgcagtaagagaagaaaggtttggttgttactttctgtttggttcattgtcctaactgaccacctcgacacctagcagcttgataacatataattatgtttcaatgagtggcaaggaagttatggaagtgggagagaaagttaatttttctttttaaaaaattttattatttttaattttttaaattattattattttctttatagagacgaggcctcactatgttgcctaggctcgtcgcgaatgcctgggctcaagcaatcctcccacctcagtctcccaaagtgctgggattacaggcatgagccaccgcacctggttaacttttctttatatatttttgtattatttgactgttacaggaaacgtatgctccttttgtaagtttgaagaggaactgatttgtccagatttggctatgcagtcacagaagacctagagtcttcctgaatgctgattcatctttgtaatgttaccacccttcatgaccccatgtgcctcaagcacctctccatgaagttcttctactaggtggcccaaccacatctcagaggccattatttggagctcagtcacagcagcacaactatcctgcatctgtttcaggagccactaactaagaagccagtgactgaatcttcttagaaaaataagaactggttaagcctaaaactgtctgtacttttctacatcacttgtgctttatggaaaggacccagaaaaataggtttagaactgccaatcacattcaaaataaaagtataagaagaggttccaagtgagggattaaatgcatgcatgactaaagaattcatcagctctttgattgaaggttagatcttgttaatcttagccatataaagaagtctagaccaggcatgacggctcacacctataatcccagcacttggggaagtcaaggcaggaagatcacttgaacccaggagttgggaccagcctaggcaacatactgagaccctcgtctctacaaaaaaatagaaaaaattagccaggcgttgtggtacatgcccatagtcccagctactcagaaagcttagatgggaggatcacttgagcccagaaagtcaaggctatgatgagctatgatcatgccactgcactccagcctgggcaacagagcaagatcctgtctcaaaaaaaaaacaaaaacaaaaacaaagtgtgaacaggtgtgatcttcccctgcagcctgagcattctgtaacagtctgatacatatatttcactaggcacccaagaactgacttgaaactatgcccacaggctctgacagtatatatccaggtgtgatttattcagtggccatagggaaattttcaatgtgttccatcagtaacactgataaagcaaaaccaaaccaaaccaaaccaaaccaccactgacaactcaattaccatatgcattgcctatgggctacctaccaccacggactgccagagttccaggcccagacagccacccaggagtatggaggtagcagcaggatgggaaagccacctccccttcatacatcactactaggagtaaatggactaggggatgtccttgttgcgaggcagccaacagccaattacgctttctattgcctgggagatatctcccttgttccggggcaagcaaaactcaacttacactgttgtgtggtgtggtttcaccctgcagaataaggaactttccttctagatggtctcagaaatgttctcccttcacggagccccaacacacagggtgctactgggtttgaacagtagaagctcattcacacccccccacttctaaatttcctaatatgaaatcacattgcctcagtacactgcagagctactgtgtcactggctacagctatagagaaatcttcagattcatgcaaacgagtaacaaattctttctttccttttttctttttttgagacaggatctcgttctgttgcccaggctggagtgcagtggcacgatcgtggctcactgcagctctggcctcctgggctcaggtgatcctcccacctcagcctcctgagtagatgggaccacaggcatgtgccaccatgcctggttaattttttaaaaaaggttttttttcttttttttttttgagacggagttttgctcttgtctcccaggctcgagtgcaatggcgcgatctcggctcactgcaacctccgcctcccaggttcaagtgattctcctgcctcagcctcccaagtagctgggattacaggcatgtgtcaccaggcctggctaattttgtatttttagtagagatgggatttctccatgttggtcaggctgatctcaaactcctgacctcaggtgatccacccgcctcggcctcccaaagtgctgggattataggcgtgagccactgtgcctggcaatttttaaaaattttttagagatgggtaccgggtttaagtgatcctcacacctaagcctccgaaagtgttgggatggcaggcatgaatcaccatgcccagtgtaaattaagttttaaggggaagacaaagtttggagaatcaagtagggcaaatgtaggaacactctgttagcaccttcttcatgtaaccctcagaaagcctaaaagcccatgttctgccagggtacattccagagcacacttcagcccttctgccctctcaaggtaaaaaccttttgtcttaaaaccagacaaaatcccaaaattcacagtcaagtaataaacaggtgctatgtaaacatggcatggagacaataggcatagagcttttcagcctcagtagaaagctttgcccatgtggcagaacccaccaagtactccctctgctctagatacacaacaatgacctataacatgaggtgggaaagagaaagagaaaaaaattatacatgcacacacacacaaatatatagccaagctaaaaaataaaggtagcatctctctgtagagtagaaatggaaaagaaatccaaaatcccctagctgctggacttgagaagcaggtaatggtgtccaggagtccaatttctatggagtaaaaggtattaaaagtcctccaagtggccgggcgcagtagctcacgcctgtaatcccagcactttgggaagtcgaggcaggagaatggcgtgaacccgggaggcggagcttgcagggagccgagattgcgccactgtactccagcctgggcgacagagcgagactccgtctcaaaaaaaaaaaagaaaaaaaaagtcctccaagtaagacaaagggcagcgatcaagctcacatctgaagtccaattccaaaccaagtcacttcactttgttataccttggtttcttctctccgcagcaagggaacttgctgaatggcaaagcaaagtgctttgaggctctagtttaaaaaagtcctgggagtgcagaaattcattcccatctttaattcctaagcaatcagccagccctgtagcatggaatccacccactcatgtagttaaatgtgtttcagtgtagaacacacacacacacacacacacacacacacacacacacgtgtgaggaagggcctgccatcatctaccctttctgggttgttaggttctgacagttaacctgaaaggctatactgtgacagccaaagcatgaaatgataaagactgtggggcaaagactaattgtcaagccctcctccagctcagaaggttcatggctttggaggaaattcacatatatgtgagtaattggtggtaggagcctgtgtgttgtggcagaaacagcaccagcaccagcctgggaatctgtgattataggtgccaactccacagtgggctgttaattgtctttaactctgggccctggcatccttgctgataacaaaaagggtcagaatcaggtgattttacaggcaactttcaaggttagagtgaaatgcttctgaaaacagtctgatacacactggggtaggaaaatactgacaaggactccagttactacttttcttctcaggaggtaataaccactacaatttagattctaagtaatataaaccaaacacagaagcaccaggatgggagaagccacccttactacttctcttaaaacatcacagacaaggaacctactattgagcaaggcccccaatgtaatttcactgttgtcatcagtccccttggaacgcagagctacaaacaaaaaggcatctctgacactgttaagagtattcatgggatgccctgattccattacacactctttcagctgaaagtgattcgaaacgcaacattaaactgcacatttccagaatggaggagaaaatctggtacaaggtgacaaagagaaaccattcggaaaaccctttttgacagtgtatatcaatttcaaggcacagggaggaaacatccattttgttcaaaagcatcagactttgtggattctgtttggatgcagcagaagtgttcttctctttcaaaagtattagaaacgcattgttgggaaagaaagcagggcagctgagggacaagccagggttaccttaccatcgtcagaggatggctactctgtagatgctaattaatggtatcaaaaaatagctgaaaggaaaaaagtaagcttaacagcctggaatcagtttgggtgtatttcttgtcattcaattttcagaatggaaactactaaataagtctgcaaatacgatgattcatttaacaagaccccaactatgcaattaagctcctaagcaaaaatattcacaaatgatggtcaagggaaaaatatttcagatctttaagtagcagcaaaaataagtgaccactcatagagccatagctgagtcccatgttccttgctttcttcacaaccagcccagtctgtactcataccacccagaataatttctcagtgtcatattcagccactttctgtagaaacatcttagtctaccattttgctataccagcaacactcatgaaacccagtgcgccagcgcaaaattttccagatcagctaaatgcctcagtcattaatgaaaggttttcaaggtgcatatcatttctcaaaaaaaaaaaaaaaagaggtctatgtgtttgttttctgtttttgaattatagtctgcataccataaaatataccctcttaaagtgatacaattcagtgttttttggtacattctcagggttgtgcaaccatcaccattatccaattccaggacattttcaaaatctgaaaaaggactccctataccctgtactttttagtagccactccccatctctccttcgttctaagcccttgcaaatactaatctactttgtctctatggattaatctattctggacatttaatatgaatggcatcatacaatacatggtctttatgactggtttcatttgctaaacagatgttttcaaggttcatccatgttacagcatgcatcaatacttcattccttcttgtggctaaataatattccatcacatgaacacattttgtttatccattcattagttggcagacatttgtgtttccattttttttgaaacagtgaataatgctgctatgaacatttgtgtacaagtttttgtgtaaatatatgttttcagttctcttgggcatatacccaggagtgaaattattgagccatatggtaaccttaactttctgaagaactaccagttagctttccaaagtgactgtacaattttatattcccaattggtaggttttagaactttctcttaaaggactctagagttcaaactagattcagatctgaaaatctcagtgatttcttattcagcacccttttaaaggcaccttgctgaaaaagttttgcctgcatgtttagatttcaatgtgtacatcacacaatgctttatttttcatctgcatcagaggatatgtattctgcttctctctagtgcagggtcaatatctaaaattcacaataccgtacggttccccagcacaaatgtatacaaccatttgttaagtgccaaatcaagcattttcttcctcatggcaagtagccagactgggtgaagccaccaaaggcatttatttttctctctactgcagtctatttatgagtaggacgaacttttctcttctttttaaagatgactgttgactacaatggctcactatttgtgtgccaagacaggtaggacttgcagagcccaggaagcaatttcttcactaataccctgcattggtcacacccttgtttgatttgtgtctgattcggacctctttacttaaaaaacagcaatgtgacggaacaactgagcagggtcccaagaagaggagtaaacacaattcaaggggtggaaaatagaagctttgaagaggctaaaggaaaagtggtattttagcctgagggaaagaatgaggaacaatctcatcacactcgctttcacgcatttaaaatgggtttattcagagaacagtgggtgaccagttcttcatgctcagagtgaaacagacaggaggaaatcacatcaaatcagtaaaattctatggttggaaaagggaaaataatttcttgatcttcacattatacatctgacgaaagctcatggatctccatccctggaattctttaaaaagatgtaaaggagctttgtctatatttgcctgccaagaatcttgaggcgtccttcactgtaatttctttatggtgctataaatcaggaactacgtctgctacatgagggcaaaaccagacccataaacaatgagatctagactgtataatgtactgagaatgtcttgcagtgtgcactgtggaagtaaacaggacctcttctttgctacatgctcctgttcaaaataagttatattacttcatgtggcagggcagggaggctcatctgtggttcatggttaggttatatgggctagatgctgcacaccagccctacctgtaaggcctctctggctctgcctggtaacagttacccggtgtcagttccttacaagcaaaggcctgggaagcccatctctcattcgttgaacataacccattaagttgggtttgggagctggctgtggtgaaatgaaaagtaatcaaagtttgcagtccaaagtcaatttcaagctatgaattaagtatactgggaaagtgagttagccactctgagaatcaattttccccacttgataaataccactttcttcagactaaatgagtatatgtatgaagggactttatagattattagtgatgctgaatgaataaattaaactcacatataagagtcagtagaatagtaatttacttggaacttcgttatttttgtgtaatgataaatgtctacaaatgggatcttaaggaactgtatgaaagaaaaaaaaattttgtgacctcacttaggctttaagaataaagtggttatctcacattttatcattaaataaaaatttaacattttgaagatttctcattgtcatttccattcatgtgttcagatccccccaacattccacagaaaagaaggaagattgacagggggattgggggcattcttgcttctcttgctcaatagctttgaaacctcactctgttcattaatattagagtctccttaacatttttccaagcatatccataatttttaattttattgtgacaaagagatacatataaaggagtcccatgccaaatccccttttcctgcaaaaattctactcaacccataatttatccaaggctcttacaactgtccaagtaaaaaatgagtctgaactatgtctgtggaaacagaaaattcttagagataacatacataatttaaaaaaattatgtgggaattaaaggagaagaaaatgcctgcaaatctgctgaggttcccagcttggacaacgaaggacgatgatgctattaacacaggagagacgagcagaagagttggtctggagaagacactgcattttgggcatttgaatttggggcatatgtgtgatgtcaggtggaggggctggtgaagacacagttggaaatgtgggagtggtgctcaggaatgaggtcagggctaaaaaagatttgtgaatagtcatgtctatatgctagttaaattataaaattgaaacaagtgttctagggaatgcatacagaaaaaggggagaaaaacaaagccgagaactgaactaacatattaagtgaaaacacagaaaaataggtctgttctctcatctaccttctaacctcagctgcctggcaaactcctcttcactgaataaatcagttaatttaggttggcctctacaacatttcctatggaacccacttctgaatgaaaacaggggacgaccaaatgaagattcctcatgctcgaaagagttcaggaaacactcttctttgtcacaggacttttctgaatctttaatatactcacgtggattgttgttctccaaaaccaggttcctttgtaacaatgcccaaatctaactaagggatgaacatctaacatctttccacctttctaccatgtgtgggtcagattcagggacggaagcatttgactgagctatagcttagggatacagtgggcttcactcttgcatcctcaccccctactcttgaagccttgttggatgtaaaatcggaactgttctgttccctcttggaaaaaggccatgacagaccatctctctctgcttccattttcttttttgagatgcacaggcagagataaagaggctgagactggtgggggcttgcctgggagaatgccaggttctctccccctctctctggctttctccattctggttattcccttaaatagttttccagataagggggatcagggcgggctcccactaacctcatttccactagttctgccttggagcttgggctttcttgttctgattcttacttgatttttgtttttgctgcttctctggaataaccttccctcatcaccaggattagaagtattattttccctctcacattgagaaggtggagaaaaaccacaggaaaaactaagtctccaaaacagataaaaatattacagaagagaatcttgctgcaataaaagggatcaaatcctctgacttcaatggattatattttagggccccaaaagtcctcaaaaatgaggctgtcacagtactgttagggatctggaaggaagggcattgaagaagagatgtggctgtggccaaagattagagataggcaaatcaggtataattttttttaacatagaagactatggattctgcactgtgagaaggagagagttggtatccagtcttgataagattctagagtaggctgaggacagtgtaatcccagcactttaggaggctgagacgggaggatcacttgagtgcaggagttcatgaccaacctggacaacatgatgagaccccgtctctagcaaaaacacaaaatattagccaggcttggtgacacatgcctgcagtcccaattactcaggaggctgaggtgagagaatggtttgagcccaggaggtagaggttgcagtgagccaagatcaagccaccactgtactctagcccaggtgagagacagacactgtccaaaaacagatactagagtagatcatgaaaggaagccttatgagggctagtgaaagaaagcagcagtcactggtggtctacctgggttccttaagagagtaagtcacctcattcccaatgcttctctcccaaaccccttccttgtccagctaaaagaaatgttaagccatagtctttacttggactttagaaatcaacagtctttcatgatcttttggttgacagtgaagaggaagggttagcacaagtaaaaataaacaaattaaaaacagtcgaaatgtaacaaaatggaagggtttccatccatgagacacttgttgtgattcagctctgtggcatggctgtcgggagagtgagggtaggttttaaggatgttatctttacaagatgggtggccttcagctctctaccacgcaggtcaattcagttctgagagatgccacatgtgaacagggaaatcacacaagaacaggccaaggagcgacctggatgatgagaggctcaagccagtgatcgtctttggatggtgagaatatcatgtctttcttttcttaatcttatttgtatatttaaattgtacataagtagctctctgctcctcccatttgacagacagccgcctcttctctctcattgacagctgcatccctgagacactacggtgaaggtgaagatcaaagtcaatggatttggttgtattgggtgcctagtcaccagggcggtttttaactctggtaaagtggatattgttgccatcaatgaccccttcattgacctcaactacatggtctgtgtgttccagtatgattttgtctgtggcaaattccatggcactgccaaggctgagaatgggaagcttgtcatcaacgaaaatcctatcaccatcttccaggagcgagatccctccaaaatcagatggggcaatgctggtgctgagtatatcatggaatccaccggtgtcttcaccaccatggagaaggctgggactcacttgcagcggggagccaaaagggtcatcatctctgccccttctgctgacacccccatgtctgtgatgggcatgaagcatgagaagtaatgacaacagcctcaagatcatcagcatgcctcctgtatcaccaactgcttagtgcctctggccaaggttatccatgacaactccggtatcgtggaaggactcatgaatgaccacagtccatgccatcactgccacccagaagactgtggatggcccctctgggaaactgtggtgtgacagccacggcgctctccagaacatcatccctgcctctactggtgctgctaaggttgtgggcaaggtcatccctgagctaaatgggaagttcactggcatggccttctgtgtccctactgccaatgtgtcagttgtgggcctgaactgctgtctggaaaaactgccaaatatgatgacatcaagaaggtggtgaagcaggcgtccgagaccccctcaagggcatcctgggctacactgagcaccaggttgtctcctctgattttaacagcgacatccactcttcaacctttgatgctggggatggcattgacctcaacgaccactttgtcaagctcatttcctggtatgacaatgaatttggctacagcaacagggtggtggacctcatggcccacatgacttccaaggagtaagacccctggactaccaaccccagcgagagcgagagaggaagagagaggccctcactgctgggaagtccctgccatactcagtcccccacaacactgagaatctccctttctcaagtttccatgtagaccccctgaaaagggaggggcctagagagccccaccttgtcgtgtgccattaataaagtcccctgcactcagccaaaaaaaaaaaaattgtacataagtaacatatactgcatatgtaatcacagtttttttaaacaaatgtttcatgaaggaaacatgtacatgaacgtattttgtatatttataaatatacaaaataaattcctgagggaggagagtcatcatctacaaagaggtggtccaggccagggaatactaagactcaggtgagctggtgacatttgggaatgtggtcctgaaaaggtgaagagtacttactgagaaatacaaggaaaaagtaggggaggggaaaagaaggagggcactgaatctcggaggagccaattgaacggccgaagatgacggcacgtgaaagcctaaagaactgtgggagcagcctctatagtaagctgcagagatgagagggaaagagaaagcaggatatctaaccaggaaccagttggacctaggaaagctgacttgagaggcacctgtgatgtcagcaaagatttaaccaaagccaaagacagcatctccaagggctcaaaggggaaaactctccttccagagttcacaagggacactcaatgctatgactggtccagctggaaaatgaggttggggaaagggtggatgaccagaaaatggcacccccaatgatgagactctgcagacagaaacccatggccaaagaggcactgagaggcactgtttggtcctcgtgagaagcctcagtgggttggcttttatccccatactccctcatgctctcgtagggctgggttatgaatctgaattatctgagtgtagacagtagggaacaggaaaggaggaagaacatcatggataaaatcaggagtgtgatttttgatagataaactgtttcctgtttttgctgggattagttatgccaaaagtggaaactcagcttcctgagacacctcccatttcaacacaagaaataggagaaatatttataccatggcctagtaaggctgaaaaaatcttcaggtgtgtaaaaaatattttaagttctagagaaactattatagttgcttagggtttaacttctttctcaaactgtaaaatgaaaatagaccagttcacccttagatcacaggaatgaataaaatcaatgaagagataaattcactagaagaaaacacactctagtaaattcaccagaaatgtaccatcatagatctactattttcaagtgtctttcttggggcaagtttcaagttgtaaggttgtctttacaatagaattattgaaaggcacttcctaccataacaccactccagaaaacactcggaagcagctctatcatttaagacccatgtttctgtgtcccaatttctatggacttatccaaatttacaatttcaaatgtttagcatcagtcagtaagtcacacactccacagaacaagaggctcttagaacacaattattatcttattcccattggctggtctcattcacaaccacctctcaaagaagaaaagcagatggaggcttcccacatgcaaccctttatggctccagcctggtgcaatttaggagtgaggtttagaaggaattagaaagcgcagtaatagagacagtcattgtaatttgaaacatgaatttgctgttcaaaaggctaaactggagtgcttaaagctaagtgcttaaaactaccccagaaccctaaagtaatgtaccataattacaattactttccttcaataatagatttaaaaagttaatactttcttgtgtttggctggaatcactcagtcatccattgtagttgtgagatctctttcttggaaatcaacatcttcatttggtttccacatgaataattcttggaagctacaaagtctttgaagggtatttatttttgccttgaggtctggtggcctcaaagttcacatgaacctcacagatgcaaactatctcagcatgattcatctatgcctatagcgttctcaccaaagggaggtccctgcctgtgtggggtttccatatttatactgctttgtgtgtttatttgtagttaaaattgttttcacaagtcaaataaatttaaagatgacctacaatgcacatgcatgagaaattaagccaaaactcagattcttgactgaatcactgtttgttttatcttggtggtgggacatgtgctttgcctaaacttcaaacttcttatccttctgcctccataattgcaatcatctcactctccacactggctacattttatttaaaccttccaactgtggaggaaaaaaaaggagcatctaacccaagacaggtgtcacctagacaggaactatctgagagctaagagaatttcttttctccatgaaatgctgtggtggttagtgtcaggcctctgagcccaagctaagccatcatattccctgtgacctgcacttttacatccagatggcctgaagcaactgaagatccacaaaagaagtgaaaatagccttaactgatgacattccaccattgtgatttgtttctgccccaccctaaccgatcaatgtactttgtaatctcccccacccttaagaaggttctttgtaattctccctacccttgagaatatactttgtgagatccacccactgcccgcaaaacattgctcctaactccactgcctatcccaaaacctttaagaactaacgataatccaccaccctttgctgactctctttttggactcagcccgcctgcacccaggtgaaataaacagccatgttgctcacacaaagcctgtttggtggtctcttcacacgaacacgtgagacatttggtgccgaagactcgggtaagtgggactccttcgggagaccagtcccctgtcctcacctcactctcactccatgaagagatccacctatgacatcaggtcctcagaccaaccagcccaatgaacatctcactgattttaaatcgggtaagcggtctatttttactctcttctccaacctctctcactatccctcaacctctttctcctttcaatcttggcaccacccttcaatctctcccttctcttaagttcaattcctttcattatctggtagagacaaaggagacacattttatccgtggacccaaaattctggcactggtcacggactcgggaagacagccttcccttggtgattaatcattgcggggacgcctgcctgattattcacccacgtttcagaggtgtctgaccactcggggatgcctgccttggtctttcacccttagcagcaagcaccgcttttctggggggcaagcacccctgactccttctctccgtgtctctaccccttctccactttcctggggggcaagcacctcccactccttttccactttcctggggggtaagcacctcccaccccatttccactttcctggggggcaagcacctcccaccctgtttccactttcctggggggcaagcatctcccaccctgtttccactttcctggggggcaagcacctctcaccccttcttcactttcctggggggcaagcaccccccatcccttctctccatgtctctacccttctctttaaacttgcctccttcactatgggcaaccttccaccctccattcttccttcttctcccttagcctgtgttctcaagaacttaaaacctcttcaactctagcctgacctaaaatctaagcatcttattttcttctgcaatactgtttggccccagtacaaactcgacaatggttctaaatagccagaaaatggcacttttgatttctctgttttacaagatctagataatttttgtcgaaaaatgggcaaatggtctgaggtgcctgacgtccaggcattcttttacacattggttcctccctagtctctgctcccagtgagactcgtcccaaatctttcttctttccctcccacctgtcccttcagtcccaaccccaagtgtcactgagtcttgtgaatcttccctttctactaacccatctgacctctcacctcctccccaggctgctcctcctccggtcgctccctgccaggttgaatcaggctccaactcttcttcagcctctgctcccccaccctataacccttctattacctcccctcacacccagtctggtttacagtttcattctgcaactagctctcccccacctgctcaacaatttccgcttagagaggtggctggagctgaaggcatagtcagggtacatgtgcctttttctctatcagacctttcccaaatcagccagtgtttaggctctttctcatcagaccccactaaatatatacaggaattccaatatctaactctgtcctacaatttaacctggagcgacttaaatgtcatcctaatagttaggccaattcccagaatgactaaagaaaaataacttttcctataaaaggtgagtaaatggccaaatgacctagactagctctgaagggtaagcactgagtcccaggttaaagattacattctaaccacacaccagtcatactctgctccgggaaaaaccttaagtacttgtgaccttctgtccctaacttagatgttgtttactttcagtttacatacagtgcaaacaccagggtgtacatgattttcaagtcaaaaaagataaggactaatccagaaaggagaaggaattctgtttcatgcaggctccttgacagcagcaagagataacaaaaccacaacacaggaggctttagaaaaaaactaaataaaaagccgtaatctcaaagaagactacagccaacaataaatattaatactataaagtaaggtcctaaggactccacagttacggaggaataagggatcagaagttcatatccattatttggaagcattaagaaatgtttagattattttccattactctgtatttgaggaggaaggggaaaagctgtttcaaacctgtatgcagagtgtaatttccctggggggcaaatgggattatgtatgaaaaaaggctggaaagatatacccctaattggtaacagtggttggggaggggaggagattataggcaatttttcttttttgcctgtttatattttctacaagaaacatgacatatatctacagcaaaaactgtgtaaaaaatccttgaattttcctgctaaaattggtctatgttttgtactaaggtagagatctctaccacaaaacaccaggtggagataggcctgtttagtgcttctcattgccccagccttataggccctcatttccccataaaaaaagggatggagaagggtactgagaatctctataaaaggtagccacttataggagcgttttgcaagagtttagggagtccacacagtggagctggctggcttagtgtaataaataggctgcggtaagagtcattctaggccacagcactcatgggggcatgatctgccttaattttacccatggggaatgacacagcaaggagctggaaggcttagacatgaagactgacctctgcagactggtgtgagggaaatggacgtggctcccagaagcggctcttcccactctcaggacctgccatctgtggcctaagaccagagacccacagccaggcagagggtctcccagcacaggcccagtcagtgctccgtctgcagctcctgtcttggtagcactgccttgctgtgtgccaacaacttgggagtccctgttttagagaatctgccaagccccaagtttgcctttgggttaacccctaactacgtatggcccattttaggagttccttagagaggtttctgtcttgcacaggtggtcaggtgagtgtgcacaaagctctgtgattagaccctgtggtgaccacacctgatgtgtgcttgtccagagggggctcactgccatggagtctgtagcagtgcctggccatgagcgtcagaggcctcagcaaaggccttcctgatcttcctctgggaactccagatagccaaggagcagccccatgctcagaaagccacagagcaggacaggaaacttcagaagctcgccttcctccaagcttggcttttcattcaattgtagactctgttggaggctcagaagaggcatggtagatgcgcctgacagcagtaacttatgcataccccgaaaatgatccttatagcagacacacctgacagcagtaactcaagaaatgagggttgccatgtggagggtgctagggggaggatgctaagtgaagatgctatacaatctgcatcctttttacaagcagttgcagctctgtccagcctgccaccactgggccatttctgtgtgtaagttccccataataaaaccttgtgccttgtttgttggctttgggtctcttcttcaggttcttgaacgtggtgtcatccctactgaaatcaatagggatctagcatgacagaggaacatgtgatgaaataagctaaaaataggggcaataccggttaagaaataaagaacacctcattgatgaccgagaagggagaggctggcagggaaacctggaggaggctgaaatgcctttggacctgaagaactgtgcatgattcaatccttcctcttattgaaaggaaagaaactatttttttttccaaagcacctgccaagaagcaggtactgtgtctaatttctcttcaacaacccaaggaggcaagaagagtttttaagtgatggtcccgaagtccccaagcagggaccgagaagcagatttacctggctcccaatatgtgctacctcccagatcaagcaaatggtcttttcaggtctgtgaatccatccaaggtcatctcttgcctgcccacactgggctgtttgggtggaatcaggcggaccggggttgagtgctggcctttccacttgtcccctgtaaccctggactggctgttgagcccctccaagcctcggctccctcccctctataaaccatggccatcaaccgcacaccatgctatgaagatcatcagtcagggctgagcaccaaatccagatagggtaaatgtgcatgagtgggagcgggcatcaggagcagaggtcctgatttcagatcacctgctttgcatgcagcagttgcttttcagctgtgagactaattgttcacaacttgacaaagcaggtcaaagtacaacacaaattgctacaacctcttgccagtcctcggctcatttcttcctcagctcttccttacttgatgggtaattagaacacttgtcaaatacagaaagttgaaatcactaatgtgactctaaaacttattgcagatcattaaacatttactagaggtgcataatgcagagatgtggtaaatgacatttcttcacagaaattgttgagcttagaaatcttcaatcgtttcattttaggggtgaagcaaccaaaatcttgagaggctagtggtttggccagacctaaacctgaggggttcattattccatttgctgagcttgctaccactcatggtggactattaattctcacctccactcctggttgcttttgaacatgtggggtgagctttgagagagccgacgtcctaagatagaggaacactcctgatgcattttgtctcctccagcgaaggtcagggtgcttctcagtcctggattcctgcctcgatccagctgctgccttttctttgtctgcactggtttctgctccatgccgtggggaccatcctgtctctcctctcctttgtaagatccaataatactgaaaatgttgaactctggtgaatttccgtccagacaattgccagggacaaaaatagtgaaatgagaacaaatgggagtgacccagaagagatgcacccagagagaccacagactctggagtcaggatgtggaggcaccgtctagggacaccaatgtcccctggcttatgtcctatattgccaggagggggatatttgtgctggaaatctaggtatgccctaaattagtgagtggagatcatggctgcaaatgctagacagagccaaaccaccatcctgaagcaaatctgtctcaaatgttgagtaacagctattctgaataaaaacattctgtgcatatggaaggctcagcttccaaaggatcttgacatttttaactataaaaaggtctcaaattaaatccatgtgaccttgagtgtaacaggaaccccaggaacaccacacttttaccaatcaaatgagaacttccaagacctttcttcctctcccattttgttttttttttctttcagcgtttactcctcgagcacctcctacttcgtgccaggcactgtactaggcactgggctcagatggggaagcagagagggcagtttctgctgcacagagctcacaatatagggaggagccgtgatccatctgtgaaggtgggagatgcctcagtcagggaggtccaggagggtacagtgaggctgaggctgaaaggactggcacggggggccatggagaaggatggagggagagaagttcaggtagaagcaactgcatgtgtgaaggccgcatggtggcggatgctcggcctgtgtgaggagctggacaaagccatgcgtgccgcttagttaggaagaggacaggctcaggggaggctcgagggatgggctggggccagtcagaaggaccttgcaggtcatcaaaaaagttcagatgagctcagtagtcatctctgaagggctttgagaggagggtttatcttttacaaaggttatccctgttgtgtgtggaaactggactggtataggacagagctgagagagggaaccagggtctgttgctgaagttcagtgaggtgtgtgacagtacatgaccaacagcagtgcaatggtgaaaaagagaactgatgtccacgagatgtcatctggaatcagaactgatgtgtgaggatggactgggagctgggcacagtggggtggaggccatgtttgctaaatgcctctatgtgctgggcataaggagagtgtgtttccctaaaagaagccatctctgtcattcatatgccaggtccctgtgcacccactgttaatgatgtcctccctggactgactgcacctacttgtctttaaagaatgtggaaaagcctgcaatggtatcaacgctgtcatggtcttttcaaacagcaatactatacataatcaatttttcaacacctaagcagagttgagcctgcttctagaagagttttgagagaatacaaagataagatttgattcctgccacaaacaagctctggcctattagggaagagagagagacacccagttacagtgcagtgtgaaaagtgaagcaaaagaaatagaggggagacccttgggcccccggcacacagagagggatcagtgaacaggtgtctgcctgggatgggatggaggagtcagggaagacctcaaggaagaagtgatgctgaagctgaatcttctagaagacatcccagggctgttcttgacagaggaggagggcagcatgttatcaagacaagggagatatgagtacctggtctggcattgccagagctcagggtatgaggatgagaagtgacaggtgaaggtagaaagaggctagaatctggacttcagtctgaagatacatcactgaagggctttcaacaaggaagtggtgtggccaccccacattgtagtaatcttggggactgccagatgggtgccaatgcagtggccagccgtgtaaggggcccaggtgaggctcctatatggagtctacaaaatatgcagctggtgattaacagggattgatgacagaaggggtggggagggggaatgcaggtcagggtaaattatcctaggtttttggtttaagtttaggcacttagtggcctaagaaaacaggagagagggctctattggggaaaagaaaactatgctagttctgggcatcttaagtgtgagatttgcaggacatcttatttatccatacttaacctttacccttgattgaaagggtgattacataaacacacacaaaataaaataaaaatatatgtggaaaataaaactagaaagatcacaggaaggtaggaattaagttaatacaaaaaacatgtactgtaaggcccttgcgcttattagaagtgggtcacaaatgcttcctaacaggcaacacagatacaaaccaggatcagtttacacaactcagggcccaaaatgaattaaaaaaagccacagaaacaaaaaaaaaattaccctgctctcagtccccaggcttttcctaaattgcatatgagagaaaagtcctctgtggtcctgaaaaaagaggaggctgtgtgatagaatgagcaagctcttcagcagggtccttcagtgaatgccacagcacatttcacacagctgtttcttgcaatcttctccagtggaggcacatggcataagcaagccattcaggaaaccattgtgcagggccacaagtgtgagcttcaggctttaccagggatagatttgagaatttctagaagggtgcgaggaatagaaatccttcctatatactgtttctctcaacagactctttcagaaataccaaaaggcagcaagttcatggccaccctgcccaataaatacctgaaaagcagttacaccaccagccaagcaacaaataggcttgctcagttggttagggctgtgggggaagcagaatgatcaagtgtgagggaagttcaagtcgaaccctgccacatgcctcatggtaagctcctgacgctctgcagagaggtgggaggctgacaagaggggagaggtgactggaggaaggttgtcatggggcctggagtgtgggagggaagtgcggcttgggcttctatacttgggcaacatcgggatgtgagtggatgctgtaggtgcataagatggctcagggtgggatgtggagaagctggctgaagacaaaccctggggcagcctgcatttcagtggcaggtgtgaagaggttccaccagtgaaggggagggagggggaagggaaatcctagaggccgagcagagagattgtttcaagaggagttggtgcgtacttatggtagctgcctttaacctctctgtaagtgggtgtttttgataaggtaatattagctgctatagcagataatcctaaatatctcaatggcttcatacagtgtgtgttcatttcacacatgaaatacaaggtctgattggcttgggcatagtcgcaggggtattctgccagcttcagcatgcacttccaaagccatcctggtttgtcaacttccagtctggagaagagtgaggatggtatgtgtggcagtctcctaggattcgtgtaatatgagtcacaacaaatttggcagcttaacacaatagaaaatgacttctctcacagttctggagtctggaagcctgaaatcaaaatcgtagggccacgctccttctgaaggctctgcagaatccttcctggcctcttcccagcttctggtgattccaggaaatccttggtgttccttgacttgtgtcttcttaacccgtctctacctccatttcctccattttaactgggtcatcttccctgtgtctgtctacacatgcccttcttaagtccagtcactggatttagggtctgccctactccagtttggcctcatcttaattatatctaccaagatcccatttccaagtaaggtccctttcacaggtgctgggggttaggacttgaacataactttttgagggaacataacagttcaagacaacagtatgtgtgaggttttcgtgggtcatacatcactcgcccacacccccgtggttgaaactgagtcatgtagctatacctgcagtacaccaaaggccgaggaaggttgttccctgtgctcaggagaaaggaaaaggcagcaggagggcagctagtcagctccaccataccacagggcagggagatgggggagcacattgggacagaattgaggctatcatgagggggaaatgcagccagggaatgcatgctctgagggacaatccgggatgtgaagagaaccaagttaaggggaagacatgcctgtaatcccagctttttgggaggccaaggtgggcggatcatgaggtcaggacttcgagaccaacctggccaacatagtgaaaccctgtctctactaaaaatacaaaaaattagccaggcatggtggcgggcgcctgtaatcccagctacttgggaagctgaggcaggagaacggcttgaacccaggaggtggaggttgcagtgagccgagatcccgccattgcactccagactgggcaacagagtgagactctgtctcaaaaaaaaagaggaagacacagggataaggggaaggttgtgcgaaatgagagaactttgagtatgtttgcaggcaggtaagaagccaaggggaagggagcaaatacagatatgtaggggcagagaggatgggtggagactttttggaggaggtggaacaaagaacactggtggaagaaatcagcacatccctgaatctaagtacggagaggcacaaatcctgtgaaataccaaatgataaaagacaagacagctggggtttgcctggctttttaagcctgttacctgatttcttttaggcctaacctgagacatgtttgttttgcacagcttattgtatatattcagatacctatactacacacattatacacagatatgttaggaacatctctcttccaagtacattcccaatgtgctaatcctgagagttcttgcagaaatgttgggtcaaccagaagactgcttgctggcaatgcactaaaacagtaatgaatactttagcatcatgtaattgtgtatctgctgcagaaagaacagtgggctagtctagctcttcctgctgtggcaccactagccctaagaagctctgatccacaaacctgcaccacttggggtaaggaagttgtctgcagagtccacattcagaaaaggtggtgtccctaaccagaataccgctttacccttttaagtggcagaatcctgatggctgtgacatgcagaggtggcctgcgtgtgagcaactggtcctcacacagagggagaaagggcacagttgcccaatcactgacaaaaccagcctcgtggcctgaacaaaattagcctgtttgagagcctgctcataagctaaagaattaagtatccattccagaaaacaatatgaagatgggtttgttggtcttctgacattcattcaatgtcttctatgggcaaaggcaatttgtgaaaagcatggcattgaaaataccatactgaacagctgtttttaacagcgccatgggaaaccctgagggactgttgatgggtgtaaaccaaaaagtatccaagacatgtctcaattgatttaaaagttcattttgccaacttaagttaaggaatgcctgggagaaaaaaacatggaatcacagaaacagtctgtgatcggtgcctttctccaaagatgaatttgagggcttcaacatttaaaggcgaaaagtgggctggaggggaaagagggagggtatggtaacccacatgttgcaagagaaaagcaacaggttggggaatagtcgattatctattcatctggggctcagtaaattagtactttccataagataagatgaacccagagtagctaccagtggagatatttaaccttttatctgcagctatttgcttaggaacaaaaggaaaggcagtttcttgcatgactcaactttcagctttttttttttttcctttttggcttaataaattggggtccctagtttttattttttttccacctgggggataatattactaatgataattattatggttattggtatagtaataaaacacttattgagcatttattatatgccaggaactgtgcttaacattttacacactttgaatcatttaatccttctactaaccttatcacagataaggcctcttattatccccatttcccccatttccctgataaggaaggcacagagaggttaggcattttgttcaaggtcccacagcgctatgataagtcacagaagccaggacctgaatccagcttttgtttctccagaatctgtgctattaatcagtatataacctgctctacatcacaagtgttcctatctgttttacatactgggcctctgttgtaaggtctcatttaaacaaagggtctggaaagtatataatacagcttttttttttagatgatctattaacattgagaaattggtgcagtccatttggaaggaccatgtgtctttgaaatgctggtggcaatgatgacctgccagctcagaatcacaaagaacatgacaagggtgtggtgggggaacaattatacaaaaactttgacacagaaaagcagcaaaacaggagtgaaaagcgagcagagagatgaatcagtgtgaaaatggattgcacgaatccaatttttgcaggcaggcctggtggcccacagtagggaaagcgttcccactctgcgatttcaaaagccattttattattgcctgggataccactggaaaagaaaagcaagggtccaggagccgggtgggaaagcacagtccagcacagagggtcagggcaggctccaggcccagcaatgcagctctaggcttcttgtgcagctgagctccctaggaatagtgaccttgacttcacagctaagtcttgcaggaaaaagaaaaagacacacacacacacacacacacacacacacacacacacacacaactgtgtttttcgaatgcctgagagctgggaggctttttaaaggctttgttgaaaaaggacttcttctgtgttacttagagacaaccattgcttgccaaaatactaggtaaaaaaaaaaaatcacaaaattcgagagctggaaagaatattacaggctgcccagtgtgtcccaaagcaactaaattatcattataaactttgtgaagacacacacacacacacacacacacacacacacacacacacacacgggcctttggagtgtgctgacttgaattcagcatcttgtccacatctaacctggtaagaatacagttctagggtccagagctaatatctggcagcaatattggctaagatgaattatatgacacagtggagtcctaaagcagctcaggaacgctatcagaaaagttcaccacatgcttttacatcagcccaaaagttcatgtagccctttcatatgcaagccatctacactgtaatgcaaattatatttcaccttgcatcatgtatttattataaacttaaatatatttactatctgcagtagtagcagtggcagaaataatatattgataatcactgttgataactagcatttattaggtgctttccataaggcaggcaagcacttgtataaacatttcaaatgcactcgattcacacataatgtttaatgcttttgcatgaattatgttttacttattttgccaccattcctccccacaccccgttacaatgtgagttccataatggcagaggctcaggggtttttgtcttcattattaactaagccttcagttctcagaacacagtaggaatgcaaatattttctgagttgaattaattcatttaatcctcacaatgactgaaagggatagggattgttagaattcctaatttacagacgaggtaactggggcacagaatggttaagtaactggctggaggttgcacagtaagtgatagaattaggattcaatcctgggccatttgactccaaaccctatacttttggtgaacccctagcatttctattttaataatgacaatagctaacatgtagcaagtgcttactatgtgccaggtaccacactgaacgccttctgtgcaccctctcattaatataacagttctgcaaaggaggctattattattttattcacacactttagaaggatcctctaccttgaccaaagtcattctgctaagttgtgtggctagaattcaaactcaggcccacgtgagttccaagtgcatgctcataaccattgccccattctgtgtcctgagccatccttcacatagagagctactgtgcactttagctatgggtctcccttctttactctttaaaaattttattttagatttgtatctaattttaaaatgttcatactatcttttttcataacccatataaagtttgggttactaaaagggactaacattaagtgaaagagcagcacccctagtctgaggggtgaaggtgaactgaaccagggccatcaaaaccatatcaggccataacaggaggaagtggtgccagctgcaactctagatctgtgatgtgctaaaacccttatgaagggattctggaaaaccactttcctttgggaaagtatcagagggatgagtcaaagggaatctgcagggctggggaggattagagacaggaaactgatcccagtcaggttggttggctctgtcagctgacaggcaggcagtagtagcgggaggcgccaagagtgggaagtatttaaaacaaagtcataggctgggtgtggtggctcatgcctgtaatcctagcactttgggaggctgaggcaggtggatcacgaggtcaagagatcgggaccatcctggccaacatggtgaaaccctgtctctactaaaaatacaaaaattagctgggcatggtggcgcgcgcttgtagttccagctactcgggaggctgaggcaggagaatcgcttgaaccagggagttggaggtggtagtgagccgagatggtgccactgcaccctgggctggtgacagagcgagactccgtctcaaaaaaacaaaacaaaacaaaacaaaacaaaacacaaaggcatgaagcctgggtgccgtggcttaggcctgtaattccagcactttggaaggctgaggtgggaggattgcttgaatccagcagttcaagagcagcctaagtgatgtagggagaaccatctctgtaaaaataaaaataaattagccaggtgtggtggcacatgcctgtgatcccaactacttgggaggctgaggtggaaggatcacttgaacttgggaggtcaaggctgcagtgagccatgattacaccagtacactccagcctgggtgacagactcaaaccctgtctctaaaaattttttttaataaaaatttttttgaaaaataaagggatgaaagaatccacttctcacattgaagggcaggatgtaatatcaagggaaaggtggtagtcaccacttaggcccacatgcagccactaaaccatgagctgctagttcaactcatttcttgaagggttgggctttgaagagtgagagaggcaaccttaacatccaagtggcagacactgtgtctgcagcctgctgactgggacctctgagagccagaaggaactcaaaggtcagtgccgtacagttcttctgaagctacagagaggaacatcaggagcagggtgggggcttcctgggaagcttagatttcgggaaactgctgaagcacagctctcagggggaaccaagtcccactggagctggcaactgaaaattttctttatgctctaggtttggagcatcttacctgtcttctgccatctatgcctaacctaacaagattgaagggaagaaaatggatcatagcctgcaggagtccaggaagctgagctgaccagcattcccccccaaacctaagtgatatgtctgacaaaagagttactttgatagagtaaataatagaggcaggtcagtctctggctggatactaagttaatggttcccaaatttcagagctggaaaacacccttgaaatcaattagtaagatcctgttaactccacttgttctttaaagcaggaaaccggctcagagagtgaagtggatttccaactgttatgcagtttgctacgggacaagattgtgattaatctctggactcccagcccagtgttttttccattgctgtctcaatgaggcagctaagagcaaagacacacacctgtactctggaaacctttctttctttccttttttgagatatttttgtcaggctggagtgcagtggcgtgatcaaggttcattgcagcctcagcctcctgggctcaagcgatcctcccacctcagccccctcagtagctgggactacaggtgtgtgccaccacatctggctaatttttaaatttttggtagagatgggatctcatcatgttgcccagactgatttcaaactcctggactcaaattattctcctgcttcagcctcccaaagtggtgggattatgggtatgagccaccatgtccagccaggaaacatctgtctctgtagttatactccttttttccccaataatgattgaaagttttgaccaaggagaaaatacattcttagcaatcccctaaaatagcagaggctcagcaaactgttcatggataaagagtaggtccagagtattatctgatcttagaaagaactgatgttgctaagcggatcacaagcaaaatctcagaaacggaggaggtaggtcctccaaaaacaggtggcgatccaggttctggtacgagttctgccgccggctatctgtgggaacttgagaaagacaattctgtgagcttcacttcccttatcagtaaaaaagggaaactggactagatgagtggttcccacagtggccccaagctcaaggattctgattcagtaagcctgagaataggggccctgcaactttcattactgttattttttaaatcccacaggtgaatacatgaatgtctgcgctggattgatagagggacgggaggatggatagatacatttgatgaaaattgctaattgcaggatctaggtagtaggtgtacaagagtgactcaattattatatatgttggcaaagtcccccaggtgattctgatgtacaggcaagtccggcagcctctggaccagaagtcagcctcagaccgagttcagggggcttcacagtccctcagagcagccccaggtgccaccttgggaaaagggagctggtgtgaacctcagccttgttctagagtttagtctgggcagctctaccttgtttgtttatacacaggagaatttgtgtaagattctaccagaaagcgtaccaacaatggacccactgcttaatgtatacaaaccactttacaagatggtttttaaggccttacatagatccaactgtttatgaatttacaaaattacttacgccttggtaggcaagatggaacgaaggctttaaaaatgaatattatatataaatgagtgtgtacacacacacacatacacacacaccctcttggttattataagagtcaagcaagagaggagagttcaagctcagacctcatggccattgccatggtcactgcagcactagctgccactgagcatgcctgggccctgtttgcacctcctctgcctcacctactaccccctctttctttggtccatttctatctggtcctcaactataaaaggtacattcctggttcaaggctgtattagtctgttctcatgctgctaaaaagacatacccaagactgggtaatttataaagaaaaagaggtttaatcgactcacagttccacatggctggggaggcctcacaatcatggcagagggtgaaggaggtacaaaggcacgtcttacttgatggcaggcaagagagcatgtgaaggaaactgccctttatgaaactatcagaccacacgagacttactctctatcatgagaacagcatgggaaaaatactcccccacgactcagttacctcccacctggtcccctcccatgatacgtgggagtatgttataggaactacaattcaagatgagatttgggtggggacacagccaaatcatatcaaaggccttggctgtttcatctgccagaacattttgcctcacctccttcagaccttactctaagactctatcccccatgactctttcccttgctgtcgcatttgaaactgcaacccacccctgactactaagtcccttcccttgccctatgtttctctttagaaattattaccaatagcatactcaacattttacttatgtgccttgctcattatctgtctttccatactggtttgcaagctccatgaaggcagggtttttttgatcatagctacgttcctagtgactttgacagtgtctggcatgaggcatatttggtgaaagaatgaagggctgaaccatacttgtgctttaagcacatcatctgtaatctgcatggcaatctagaagagcaggaaccagccccttccacaaatgggaaagcaaggtattttctggaggggtgagggccagcatttccagaccctagcacctgtgatcatcccatttcaacactctacctcccacaaccctggctcacttccaagggctgacatgtttctccctcccttcctgtactaacagctaaaccatatttgggcctggagagtttattaccttgcttaaacaagacaggatagagttgaaggtgaaatgcccatattgttcagttaactccttgaagcaaacaaatcatttgataactgtacaccacacaccagtaaggactgctcagtgaacatcaacatcccttcaggaaacaagaccttcataaaccattgtctgttgatggtggctcaatgagggttatatttcacaaaaacgagtatgatcccatccaacatttatatcacaaaatgaccccaagtgccaaacattgaagcactattcacaaccacaatgacactgtgaaataataaagcacagggcttagcctgtagaactctgctgcaatggattctgacctgtgaggcaattctgttgatgcagtgtaccagcattgctatttctgcggccaaagaacatgattacaaatgtgtgcctttaacccaaggcagccttcactcagtaaagcccagagcttcatgtgtctcctgaaacacctgccttgcctgttacactgcattgtaaatggatgcctgactgcctgcctacctgggctgactacaagtagaagaggacagagacctcatctgcctacttcacggtagcttccccagcacagtgcccagcagatgcctggctcatggaaggcataaaaatattcattgaatcctgctcctaccatgacattttactctgcttatactttatcttctaactatgtaatatatgcacgatgaactgtaaaagtttatcatatgcaaaccgaggatggattgaggtgtatatataagtaatccattcctaacagttatttcaaatcttatattaaggatgacagcaatgggaggaaatgaactcaaaaaacataccaaagaactgcagtttgagagcagataagaaacgaaactattaaactgaactggtatatcatttaaaaatctttacaacataactatgacaatttaaaaataaccaccaaagaacagaagttgttaaaacatcagtatagtcacaccctgcctgattaatgtaatctttctcctttagcaatgaaataatctttgctttctatgatgaactttccaaagacaaatatttggtatgctgtttacttgtaggctttttcattattcaaatgtgttcttctccaagatgaaagtggatcttggagaagaaaaataaaaattagcttggcatggtggcacgcacctgtaatcctagctactcagaaacctctttcttcactatgtttgacagctaaagctgaacttactgcatctctcctaaaactaacagtgacaaaattcaggtaacaaaagaggtaattggtctttggactttaaaaatgatagtgatatccaagttgtaacttcatcagaacaaaagggaaaatgtatcaaaaactgaatgaagacactattactaattgaacctaatatgaattcccttttcaatgccactgctggccaaaactgctaactgtccaccaaaatcaattcccttgggcctgggtacacgacttagactacatttcccagcagccttctttgcttctcagtaaagtcacataactgggttctagccaatggaatgcacccagaaatgttgtgtgtctctaccaggccttgcccctaacaccctttcttgagtgctcctccacactcttgtccccttctgtctcactggatggagatgcctcaagagctcttggaagccaagagttaaaaatgacagagcctccttcggcctaggtcctcgagtgcctgaaagggacaaaggcactgcttcattaaactcttaaaggaaagagacaaaaatgaaaatagtcatgttacttaagatcctcaaagtcacagaaacataatgctttgctgggtgtgatggttcatgcctataatcctaacactttgggaggcgaggcaagaggatggcttgagcacaggtccagtatagtgagaccccatctctacaaaaaataaaaattagcttggcatggtggcacgcacctgtaatcctagctactcaggaggctgacatgggaagatggcttgagccaaggagtttgaggctgcagtgagctatgaccatgctactgcactccagccttgtgacagagtaagactctgtctcgaaaggaaaggaaaaaggaaagaaaagaaaagaaaggaagaaagggaaggaaaggaaggaaggaagaaagaaaaagaaagaaagacataatatttctttttgtttgttgttttttgctttttttttgagatgaggtcttgctctgtcacccaggctggagtgcagtggcgtgatctctgctcactgcaacttccacctcccgagttcaagcaattctcctgcctcagccttccaagtagctgggattacaggcccacgccaccatgcctggctaatttttgtaatatatatatttttttagtagagacggggtttcaccatgttggcccagctggtctcgaactcctgaccttgtgatctgcctgcctcggcctcccaaagtgctgggattacaggcgtgagccactgcacagggcctcaaacataatatttcatggacaccttgaaaaacttagcacaacatccttgctaggtagaatgcagttgatgcacaactatttccattaagaagaacccactacattcttcagcggcttgttgcatctataaacagttctcctgatcagtatgataacaataatagcagctaactattactgagcagttgccatacacctggctctgtgctgaaggccttccaggcatctgctcatctaatcctcacctgaggagtgagtactatcattatctccatttacagttgacaacactcagtacagaaaacatgagattggctcaaggtcacacacaatagtggcagagccaggattcagctcaggccatctgagtccagagtccctgctcttaaccaccatcctgcctgcctgtggctatcacttctatcccaggctcatggacagctagccttaccaccttaccccataactgacaaatatttgatcttttacatcaacaaaagttatcttttcatgtggctgagaaactttagctcttttgaattttcctcatcttttcaaacataattccaatctcttcagcactccagtctctcttttgaaggttcctgatcatctatacacatgttgaattatgtcacctagaaagggacttcatgggtaaaatgacattaatagtacttccccaaatgggttgatgttaggattaatgaggttatttatgtaaaattcatgtaaagccctagacactagcaacagtacttactatggacaaagtaagccagccagtcagaaacattagctattatttgccttatagcttaaatactgcagcctatgatcagattaggttctggtgtctatatcacactactgaccagattaaatttactgtctacttaaatacatttaaaaaaatgtgaaccattgataagctgtctcccctatcctgctagttttctttcttttttttggtgacagggtctcactctgtcacccaggctagaatgcattggtgcaatcatggcacactgcagcccaacctcccaagctcaagtggtcctcctgcctcagcctcctgagtagctgggaccacaggcatgtgccaccatgcccaactaattgaaacaaaaatttgttaatagagacaaggtctcactttgttgcccaggttggtctttaagtcctgggctcaaatgatcttcctgccttggcctcctaaagtgctgggattacagacatgagccaccgtaactgactgccaggctggtttttctcttttcaacaggtgtgatactttacctttactgtggttaagcttcacctggtatttacccactttcccaggcactaaaggactttttgaatcttgctagtttgtcttactcggtttcatatcacctacacattagatgatcaggccctggaaatctatcctggtgtgggctcgagtgggcaaacacagggccttgggttctctactacaaagtttcctcctggcactgatccactgttctaccctagctcagcagccaggcatagaaaaggtgactatctcgatcacaataatctcacgccagcatttctaagtgcaaatattctacttctatgaacttcatgagacttcccagcttagcctttcagtgtgtaagagacacgggacgtgtttcaaggcacagcttggttggaatggggaactacaactacactttcccaggggcccaacaatgacagacgaaaagtccgcacgggggcatgtctgacccattccagacaagggaatggaggccgggataggataggatgcttcacagctactcaggcctcagaactacccagcaggaagaggaggctgacatgtggagctggatcatgttagaaattctcacccaactctactcttcagaggaacagggcctaagttctaggatgtcaggctggcagaaaggaatctgcagtcagccggcccaggtacaggcaggtcgcccccgccccactgcaggtagcaggctgcagagtggaaggggagacacgggttccaggagcttgccctgcgtgtggtgtccggctgctgcaggactgctgagactgccttatagtgtgcctgcagtctaacgctttggccctcaggccaggaacagctaaaatgtttcaatccttcctagctctttcagatgcccaggggtagactttagagtggtgattcttaaacttgagcatgcattggagtcacctgtaggacttgctaaacacagactgctgggtccacccactgagtttcagcgagcagtgatctgctctcctaacaagttcccaggtgatgctgctgccagtttggggatcacactttgaagatcactgattcagagcaagaagtacctgagagaggaaggtcagagagagaagggcctctcgggtgccctctgtgtggatggcaagtggcctgatgggaaaagtacagactgttttgagccatcacttggtttctgtgtctctgcctgtatttgtgatcatttggtagcattattttctttctgctaatcccttctagaggttatgggtatagctaagggattacatgaaatacacactaaaaagatggggagggggctctgcagaaaaaagggagaaacagcaattcaactttcacagtggagaagagttgttgattttgttttttttctgttatttttcaaatacatgccaaagaaagtgagaggaatagtgtatttaatatagttaatggcttaagatcaaatatatttctgaactcagaggaaggctactaacagagcaggagctcactggcacgtgtggatagatgaaccacttattagcaaaaaggagtttcagaaaggatttgtactggccgttggtgaaatccatgaacataagaagaaatgaatagttctttgcattcccttggcttggaggcagttacataatatttcattattttaccaccagcaaagggaagaaacctggagagaagatgccacagatgtgtaattgattttgaatttaggaacgtaagtcctgtttaatacctaactcctgtcctcaggaacagtcagacttgtcaaaggaactcacctttgaactaatagagaaagctttaactgtaaaggggggtaattgtggaaaactaaaaaggagtgaaagataaatgaaaggaaaccatcactggcttcgttcagtgacaattcatggaatgctattcactccggtcctaaagagctaatgaatgacacattcgactttccctaccctttcctaggagactctcaagcatgagaagatgaccctctattcccaggagtctgtgggctcaattcaaaaacttagtgagacacttgcttccaaagaagttataagcacaacaaaatggaagtctgaatttgtggtagtaatcatttatagaatcagaaaatgcttatattattttcaatagattatgatcaaaatgaaaacacaacatttatttttaattttaattttttgagacagggtcttactctgacacccaggctggagtgcagtggtgtgatcacggctcactgcagccttgacatctctgggctcaggtgatctgcccacctcagcctcctgagtagctgggattataggtgtgagccactacacccagctaatgtatatatatatttttgtaaagatggggttttgccatgttgcccaggctggtctgcaactcttaggctcaagtaatcctcccacctcggcctcccaaagtgctgggattgcaggcatgagccactgcactcggccaaaaacacaacatttaaaatagtcttagaactttgggacgcttggaaggagatgggagctctcatgttgagaaaacactccttttctatattataaatgaatgaattggaccatccaaagcttatcttgtcaacaactgcagtgcgtttaaaatagcctctaaggcagccttccactccctccataatccattttaggtgaaaactaagatgccattgattataaggtgtgccactatttcacataaaagcaggaagaaaaaaatgttaattagaacttctttatttagagatgctaaaatgagaaaaacaaaacctctgtgagtttcagcatggatgggaaatcccagggtacagtgcagagattgtggacaagatcgaactcccagtcttgggcgggtggtgtccctgctcctccacagctgtcgaagcctggggaaaccagttcccctcactgggcctcagtttatttattggtaaattgtatttaactcgtattaacagtgcctacttctcactatattattgagaaaattaaatgtgatcctttgttatagtatttaatacgtgccttgcacttattagctattttaatgccgctattactataagtctggcaagagtagaattatgaatttaataaatcttaaatgctttttaaaactctgagtgacttcacccagtctcagttgctaaacctttagacattgtttaaaatacgtggtaatggctttgcttcctcagtgccttagttctctagagatgaaatgaaatgatctctaaaatggagttcctaaactgaagaatcagtcagagccctaaggagctgatgactcaaacacaatgggtgatagtttgcatattgctttgcatgacatttgcatgctactggttcattttttgcttgaagtgaaaatccgcccaccatctgcttctttcctggtcccttatgatcccctaggtgttgagttggctgactctgccggggaaaaataaagcaactggcatgcatcaagcagttactgcatgtgcctctgtggctggttagctcggcagagtagaagggcaagttctatcagggcacggaccagaccacatggatcaggtactcgcgtcactgtggaccatcctacatgaatggtcctatgtcctctgaatgggatggtcgttgactcaaaaacccataaagccacaaacagcatcaggcaacatttcctgaatacaacccctaagtgtgcagatgtctgatggtaaatcagatgatacacagcttagttcctgaccattggcagcttccaaatcaaaccagggcaaagcttctcttttcctgagcgtgaataattatgggggcagtgaacatataacaaatattttttactctcgaaactgtcaagatgtaaaaaaaaagcacatgacagctaatatctagcaataaagaaaacttagcccttcattaatcagggctctgttgccagaaccttctgcggctctaagcatttgttttaaactgagccctgggattcctgactgctcgtcaatcagtgataatggacctacatttccacagatatgatcaaagctcacttagctgtggtttcttgggaataactgaatatttctgtaagctcaaatacctatattattagtatggcaaactagacaacaatcctagaagatgatatcagtatctattgtttgtaaaagagctgcaaatagcactctagtaagtgtcgcataaacgatcctttggatagcacataaaaataccaactcacattgttctcaggtttcctgaagtatgacccatatgtgaacagaaaacccaaataatcaactacaaaaccccaaatttatatctggatactgggactagaatactgtaagcataattaagcttatgaggttttagaggtagtattttatcattaagcttattaggttttagagatactgcttttttgatttttttttaaatgttttacagctttattaaggataaaagtatctgttaggcttttcaaatgattagatataacatgtaaaacaaaacactttttttttttggagacggagccttgctgtgttgcccaggctggagtgcagtggcacaatcttggctcactgcaacctctgcctcccatgttcaagtgattctcctgcctcagcctcccaggtagccgggactaccggcgtgtgccgccacacccgctcattttttttgtatttttagtggagatggggtttcaccatattgtccaggatggtctcgatctcctgacctcatgatccgcccgccttggcctcccaaagtgctgggattataggcgtgaaccaccacgcccggccaaaacatcatacttttatgaacacttagaaatacaagaacttcagttacattaacatttccaaaacaaattctaagaaatataaaataaccaaaagatactttatagtacaactttactttctaaaagtgtcactcctcatgggataatttttagagattatctagtccaataccactgcctttatagatgaaattgaagtctggtctggaaattggcacctaagtacaacagaaggcaagagcccagaagatgaactcttgggactggcagattccaggacagaggactggagcttctgggatgcaggcttagaagccctggctaggtaggtggctcttttaaggagcctggagctttgaaggaaactacgtttaaaaatgaggaaaaaaaaaaaaaaaagagagaaaaaggcactggggaggagttgagtctcgaagaacagtctaacataaaggtattccagccgggaagttgagttaacttctgactcaggtcatctggtgaaaggcacttccctgggaggtagggtgggcctgtttccaggagcaaggcactcagtcacttccttagtccctgagtgggccaggaagcaaactcattttaaaggacaggaaaccagacataaaggctttaaaaggtgaacgtgagtgcaacagctgaatcatccactcggtcttactcaattggagcagacaaagagcaatgaattgcctcctttgctgctctcctctgtctaccgaccagctcaagatcaggaactgaacaagaggccaggggctggccactcagtgtgttttaaaagcccctgaagaccatagattcctgtctttgaagctgctcaaaccctgaggcgggagaggaaaggaggggtagcagatgtgctggttcttttccatctgtccccatcctggaggtacggccctggcctgtgtctgtgtcctggcaggctgacctccctgggccactcatcagctggcttcctgctggggtcagccgatgggaaggtcaggcaagagatgggagggcgggcagagagaagtcagcatatcttctcccattccttctaacagctcctgcccagtggtccctcattagtggctcccactctccttggctctgctacagcgtttccttccctggttcctcagggtggtcaactccttcctggggacctcaacactcctggccggttctctctacctccttcattcacagttgacccatctgagttggagtctgtctcctgtcagaaccctgacctgagacatgggaatggcagccatggggtaaacatagatagcatcttacacatacttccatttactgggcagaattttacaaggaaacgtaaatatatacatttttacaacatgtattacacacttctccacctctttcatgttagaacatgtaattacatttcatgtaatacacgttagaatatttgttgtaaaatgtatatatatacgtttatgtcaccacatatatacttttgaaagcaacagaccttcaacaaacaccaatcttcaagcccccaaaaccactgccaggtcggtttgctccttgttctctgggatcttcccttggaaaggacgctttactaggaggaacgaaggctgcctcagcctaagtctgctttgtaaatggaagtaaaattaaggtgaatttcttgattgcctcaagggaattggtggtctgggctgcagaggcaacagcaacttaagctggagacagggaaggggaaagggaaggggtgggatcagacctcaaaaagggtggagcaagcaggagagcccacaagagccatgtgacctagaggaaggggacagaagaatgagagtcctcacagcccttcggggggaagagtcctgtacttttactactttcggaataaagagtcagttctttggaaaaggccccactctcaggccagcatatttcgttatgaaagcggtggagaagtgtgtaatacatgttagaatatttgttgcaaaatctgtaatttaaaaattccccacaccaaaagtgaagaagcatcagttatttaaaagaaaatcacaactgccaggtggtggtgcaacctgtaatcccagctactcaggctgctgaggtgggaggattgtttgagcccaggaatttgggtctagcttgggcaacatagtgagaccctgtgtctaatttttaaaaaataaatgaaataaaaacataaatgtatcttattccctggcaatgctggataaaggaagggttaacaatgatctcttggctcaaatttccttcagttgaacccggacgtgaggcaactgcagcttctaagggaatgtgcataaaaggagaagcttctgggagagaacagtgcaaagtcactaagtaaaagtggagtcaactggggagtcatcccaggcccccttccaaacacccagggcactcgaatccctttccttcctcctcatcactctcacatattatgctcctgctaagttttcactgagaaacagattctgaagtcaaaaaacgtttgaatactactggtttagatttatcacagacgtgtacatgaaatgctatatgcataagtaagagactgcctttaccttgtaatatcaacctgattgtccttaaatgcattttcattctgatgtagaaggcctgtctttaattatttctaatcatttaatttttgagacaaaataaaaacatcagaaggcattagaaattagcaagaatcagacagctcatctgcttacctgctatccccagcatttgcaacatacagcttccccaaaaggcaaatcacaatgagggccgtgcagccaccagatatattatatgaactcctctctcgttctatctgtaggtcctggagaataaaacagagttagtgttggattgtgcaggatgtgtagcaaaagctttctcactttcattctcttgacagtccccagactctgaatgtgcttcaagaagggactagaaaaatctttagtgcttgctttcctaccacctgatgagcatttctggagaggacactggcataaaactgccacatattagaccatctgtgaaccagagacaggaaacaatagacagcaaacagaaacaatcagacaaaaatgcaaataaaatgtaagttgtattcagtaaatatcacagcttatggaaaatttagtctttgtggattgcatgagctaccatgtgaaacatacactagagaggctgaggatgacaagtacttggacctgatcaatgttttgtttgttttttgaagacaggatctggctctgtcacccaggctagagtgcagtggcccaatcttggctcactgcaacctgtgcttcccaggctcaagcaatcctcccacctcagccttccgagtacctgggaccacaggtgcgcaccaccatgcccggctaatttttgtattttttgtagagatggggtcttgccacattgtccaggctggtctcgaactcctgtgctgaagcaatctgcctgcctcggcctcccaaagtgctgggattacaggcatgagccactgcgcccagccttgtctttttagagaaggtttgctctgtcacccaggctggagtgcagtggtatgatcatagctcactgcagccttgacctcctgggctcaagcctcctgccttagcctcctgagtagctgggactacaggtctgtgcagccaccacacccagctaactcctccattttttgtggggacagggtctcactatgttgcccaggctggtctcaaactcttggcctcaaacaatcctgtctcagcctcccaaagcactgggccaccatacccagcccagatatgatcaatgttttaaactccaaagtcttggataaatagtctcttttacagataaattacagaaagatgtcttctattcaacacaggcaggagtcaagccatgacttatagggcaaagacttacaatgacttataaatgacttaaaatgacttaaataaattataaatgacttataatgacttaaatgacttcaaatgacttatagggcttctgaactctgacctgacttttcctcttcccacagccaccaatttacaatggtaaaacgtttataataattagaaacattcattgagaactttctctacgtcacgtagtgtgctgagcactttatactcaaactctcatatcgtcctcaagaccatcactatgaacctcattgtttagttgcagagaagtggggtagcctgcccatatttacctggctagagtctggattccaacctgcttctcttccaaagtttgtgttgttacctgccacctaatgaggcctccccaaggaattgatattaaaaatagaccaacactggcatcatcaagacagatacctgtgaaattctgtgttagcgatagaagcaaaggttctgttacctcagaaaaatctgtgttagtaagatacattgaatgcctggctaaaataatgccaaatcttccagtggtaatctactacttttggtgcagagggaaggaaaatgagggctggctaaaaattacaggaagaggaagaaacggtgacgttgatgctgttgttggcagatctagggtcaggccactattgtaatcctgagaatcccacagagttagagctcagctgcttcaaccagactcctcatggaaaagggggagagaagtcaagaccccagcatttaccagcaactgctttgctctaggggccagagatggtaacataaaaagggtaaatcaccaatgggaaactggaaacagaagagcttgagcttagggatatcatattggttaaagagcaaatggaagccaggcacggtggctaacgcctgtaattccaatactttgggaggcagagacaggaggtcacttgaggctaggagttcaagaccagcctgggcaacatagtgatacccccatctctataaaaaataattagctgggtgtggtggcacatgcctgtagtcttagctacttgggaggctgaggacagaggatctcttgagcccaggagttcgaggctgcagtaagccatgatcatgccactgtgctttagccggggtgacagagcgagaccctgtctcaaaaacaaaaacaaaataacaacaaaaaccagtaaatagagaaaaaacacaaagccaggacttgggagagaccaacacactgggagagagctgggtaagagattgcgggaggggaactggagagccacggggaggaggtaggaatatgtgttgggggatgtagtggtttataaacaagtgaggaaacacttcaatatgggagtgaacagcagcagcaaaagctgcagaagcatcaagcatggggcaaacttcaaaggactatgtgggatttttaacatttacttcaactgtgtataaattagctttcttaaaggactgtcgtaaggctaaattagctggcatgtgtgaggggcttagtaggatatctggacccttcccgcagcccagaagcttcaacattgagagcggtggcctttcttgctcatcttagaccctcaacacctaggttaggccaggtaaatggtagtttaataaatatctgttcaatggacaaatgaagaaataaattttaaattttttttatctgcctctccccttacctctgccttaatatgaaaaatggattccacaattcacaaatgaaaagcttacaatgccaacgctcgctgagataataattaagcagaaacccatgcttcaattaaaatgcttgactgccaagaatggttatcagaacctacacaagactggtagaaggctggaggatgaggaggaggggcacgggtgtcaggtgggaagaattatctcaagcaaatagaagagaggagaaggaaaacatcaagatgcctgtttaacctccaagaaaacccataaaaacagaaccccaaaccctactaaggggtttgtggatggaattgctactttttttgcatttaaagaacgcatataaagttgatactatgatagatacatattttactgaattatataagttgataaagagtctgcatccaatacatcaaaaggaactgctcagctacagagactattttttcactgtcagaatcaatatttgcttgaatacctaaaaggctgaaagacaatatttattaaaaattatttgaaaacgccgggcgtggtggctcatgcctgtaatcccagccctttgggaggctcaggcaggtggatcacctgaggtcaggattttgagaccagcctgatcaacatgatgaaaccctgtctctactaaaaatacaaaaaaagttagctgggtatggtggtgtgcacctatagtccaagctacttgggaggctgagataggagaattgcttgaacccgggagccggaggttgcagtgagccaagatcgcaccacaccactgcactctagcctgggcaacagagcgagacttcatctcaaaaaattatctgaacacctactgcttgtatactgtctatagactagaatgtgaatgatgtttgtttgatagacttgatcaaaccactagtatgatccaaaaggtagaaacgttatggtgcaaaaagtccacgtaacagggccgtccacggcaacaaattcctttgggactcagttaagcaagttcgggctacaccacaggtaggtacattatttatcatggtttctatcacaagaaattctgcttagaaaattatgtaatgcttaggggaaaaaatcaaggtaaagagctcagcactaaaacttttctgctttaactttgggggaaacattccagttagcttacccatttaaccccttggtattatattaatagtgtgactcaatattttttttctaactgatttcattatttctttcacctttttctacgttcagctacattccctctgtagctccccctgaataaggaatgctaaatttggcagcactttctcataaagagtgaacttaagtactttttaatccaagaaactttgctaacatgtgcatgcgtttgccacttccctcccccacatttgtgtgggaacataagtgtgcatacatgcacatgtgcacacacacactttaattacaagtgtcctctctgggatcatggtgggaaggatttgaaagacgtgtttccatagacttcatccccctgaaggattcactgtcgttaaaacacactcttctatttcttctaaaaccgtgtgcaactagaacatattctaaaaataattgcttccctccccctcctccctagaagccaaaatagcacatttattttttccctacatacaccacctactcctctttaaaagatgtttcacaaaatcttagtactgaaaggaacattaaaggaccatctgggtggttcttttactatcagagcaaacatgatatattaagtcaataaagatacatttaccattgcattatctaccttttttcttcaaatcctcacctttcagattagattaagtttttaatattctacataataaataaaaacatggaagtattttcttaaaaacctcaagtttttggtatttttacaaaaatcaatgaaaccacgggaaaaactgcttactgctttgtgctaagcaaggactgatttagaatatctccctatttttgctgtcaatgaaccccgagccctgtgtctagaataaactgattagcaaaacacatgcatatactatcattcaagtatggtctaaaaggatcgattaaatgactcttaagattcaattaacaagataattgatttatctgcttaatcaatagtcctgaagaccttgcagggcaactttctaggtagcaggactgagttatcttctgttgtgtctgcttaaacacaacatttaagcgaggttaatctttaaatcaaacaatggatccagtttttaagatgtgggattttattttgctccttgttgcaaggagaaacgggagccgagaaagcaaacagagggccgggcgcggtggctcacgcctgtaatctcagcactttgggaggccgaggcaggcagatcacctgaggtcgggcagtggagaccagcttgaccaacacgtagaaaccccgtctctactaaaaatacaaaattagccgggtgtgatggcgcatgcttgtaaccccagctactcgggaggttgaggcaggagaattgcttgaacccgggaggtggaggttgcggtgagcccagatcgcgccaagccaagatcgcgtcattgcactccagcctgggcaacaagagagaaactccgtttcaaaaaaaaaaaaaaaaaaaaaaggcaaacagagatgtgtgtgcaatgagactaattcagcaggaaagaagtgcaagagaaaaatattgcccgggatggtaataatttggtttgaaagtctcatagatgatgcaactccaaggtcattctttgtttcctaccaatttcaggttgcaaaaggaaagcaatatctggtagcagaaaggagcaagtgttgggtagtttcaataggacctggcagctccccctagctgagttaaaacacggctctgagcacattgctaatagtgtcagtcacaaataatcagattctgcatggttttagtatccaaatctgatcccagtttattctgagaacaaggccatctgccagccaggcaatggggaagaaaagccagcactctactgcctactattgccacctgccggctgctggtggaatcacatgctcattccttcctagagaaacttcccgttctaacaaaaacaaagagaacaaaaccaacttaaatttaagacagctatgtgggttcccaatttaccattaacatgctaattttggaaaacactaatttatttattataattaatctataaacactaatttatagatttctaaactataaactttgccccctttttgtcacaatgtcaccatgtatttataaggtttttatcaacaaagtctagctgcttggtatttccaatcatttacccagtgatggaattacatatagtagttccataagttaaaatattgccattttcttcccttcctaagaaccgactctggtggggaatctagacccactcttaaaaggaaatagaactctgagatcctcccggctatgtccagagctcaaatcccatagttaacaggttaaaacggtaatcactgctaacttggttctgatccctaggagggcaaaggcttcctgtaactaaccctgcagtggaatcgacttcctccatgagtctgaaatgttgattattcaaccatgtttttgggagggtggagaagtagggaggaggtttgaaatcaggacttagaagacacttgtcttatttatacctattgtcctgggccaagcgacaatataaatataataggtgacaaaacagagctaagccaggccttgctgggaagcagaattgaagtcagtcggaaaattcctgagattttggtcctttaggaagccatggctcacttttcatagtggacacaggagggattcgctacatagccttcacactatgaaggaagatctgagatacaatcagggggttgtaggggcacacctacctctgacagtgtacacagtaagtattaaaaaccagtggtcataggtcaccttcaccacaagccccaagctgtgccaggcaacccgaggaccaaagatgaaaagcactgctctcaaagaagcttatagtatttgatgaaactgttaccatctcccctcattggaagcatttttttctcttctgttcgtctgtattttgtgactagtacctactttttccccagaaataggtactatttattttgacttgagtgtttctgaacatttttaacagtgtatcccttttggaaaggtgtcaacatttcactacctccttttgttatttagaatatcaaaataaataagatattgcatatttctatattcatataatgtgggactacaaatgcccccagataaaatatatatatatatatatttttgagacagagagtcttgctctgtcactcaggttggagtgcagtggtgcgatctctgctcactgtaagctccgcctcccgggttcacaccattctcctgcctcaggctcccgagtagctgggactaccgcccaccaccacgcccagctaatttttttgtatttttagtagagacggggtttcaccgtggtctcaatctcctgacctcgtgatccacctgcctgggcctcccaaagtgctgggattacaggcgtgagccaccacgcccagccttgttttgtttttgagacagagtctcgctccgttgcccaggctagggtgcagtggtgtgatctcggctcactgcgacctctgcctccggaattcaaatgattctcatgcctcagcctcccaagtagctgggattgcaggcatgtaccaccacgcctggctaaatttttaataattttagtagagacagggtttcgccatgttggttaggctggtctcgaactcctggcctcaagtgatctgcccacctgggcctcccaaagtgctgggattataggtgtggaccaaagtgcctgaccataagatcttatgttttacttcctcagtggtgtctaaaagaatactgattttaagatgtaagctcaataaatactagtgactgagaagagcagttcttagtgaaaacaacacaaactgtttttcctctgttctcatcccacaacaaccaatacagaagacttctgtgaccaaatgtgtgagagttttcccccacataaccagcaagcaatcagttctgcagaagacaccagctgggcgtcctccagttcaattccacacaattatgtacttggagatagcatcagatttcacaggttgagggctcagtcccccaactgactcccacttctgatgccagtcgcaagccccaggttggtttacctgtgcttctgactgaccagctataaatctgggttcccaagacccccctctcctaaggttcgattaatttgctagagtggctcacagaaatcaggaaaaatttacttacatttgctagttcattataaaggatattacaaaggatatggatgaagagatgcatacggtgtggagcttccatgccctcacttggcacgtgaccctccagggacctccacatgttcagctacccagaagctcactgagccctattctcttgggcctttatggagacctcattacataggcacgagtgtttaaatcatcagctgttggtgatcaactcacccttcagcccttctcccctctcatgaggttgaggatgcgtgcacccgtgtgcgcgcacacacacacacaaattattggggcaaatctaaattaggctattctttcattttattcacattaatacacctgacatctacattatcaacggcagtttactgtgtgattctacttagttgcacagccctctaatcctgccttggtctttttgatgaacagaccccatccagaagctacccaggggctgccagccaccagtcatctcattaggatacaaaaagatacttatcactttgaagatttcaaggattttaggagttgtatgtcaggacatggagttgaagacagaatatcataatatcacagcattccattgagggacaagacaaacagatggagacagacaagcaggtagacagaaacaaagagagtccaaagaattctgattccacattgttgagctcttataaataaagcaaaaactcccagtgaaggagaagctctgcttttaaggatattgtgacactcagaatctccagagggacagctgcataaatgtcatcagtgaggcaaattagaggcttaggtgcaaggcttggggaactttacttttagggattaaaagtggaagagaaggcaagagagccacaaagctgaaatgcctatatgacaactcttacttaatattgaatttcctattatagaaaatcaatggcacaaaacccgcaatacctaaaggacatctagaaacaggaaaattagagagtgggtggctactgcggtgaaaaaaaaagtttaggaatgatctggaaaattcaaagctgtcctgctatagacagctgtgtgaactgtcctcgggttgcctggcacaccgtggcgcttgtgggcatttcaaaaaaccaaaggtttacacggtaagacaatgactctcaaaaacctaatattgagagggggaggaaagaaaaaggagttggcaatggccttccagctattattttgaagctggtataatttctgtgctgtggattctgaagctcaccttaagcaatttgataaggttaagacaggcattgtttctatgaaacaggagtgtagtttctctgaaatctctgatgacgcaaagaaaaacaagagcatctgtgattaaacagaagacttatcattccaaagaaggtcacatctgagagtgaaatgggagagtattaacaattaagacagcaggcacccactgacccagtccccagcaaagcacaaggtatggccacccttccaggtgccatgagaaccaaagaatggtgagcttctcacttaataaggccaaccagaaaggtgctgtaaaccaaaaggtatctgagacaggtctcaatccattcagtttattttgccaagggtaaggacatgcctggaagaaaaaaaacacagatcacagagacagtctgtagtctgtacctttctccaaagatgaatttgaaggcttcagtatttaaaggggaaaagtgggccggaggggaaagagggagggtatggtcatccacatattccaagagaaaaggagcaggtaggggatagtctggggctctggaaatcaataaatcaacactttgcgtgaggtaaggtgaacacagagtagctacctgtggagatattcaaccattcatctgtagtatctgcttaggaacaaaaggaaacagtttcttccacgactcagctttcagcttaattttttttcctagtgatttccaatttccatagtggattgggggcccagtttttattttcctttcacagtgcaaagccccggtaagctgtaggcaggttggggacctagacagacaatctggggggaaaaagtgtgaagaggaagctagggcatgggggtaaacctgaaaggaacaaacagggaagagacatagcttaaagctaaaggttcatgatatggcacatctgggcctgggtctccacaggggcactccagccttcctcctcattcacctgccattgctacatttaagatctatcttcccaccacagcaatggtggcttactggctttggcctacctgggttttttctcaggctcggtttgttacccaggtttcctgagccccagggcattcattctcccaaccctgccctgcacatgtctgctctactcctgagcccccacaccccagcatcacctccccagggaacctttcccttcatctctttaccagactcctgcatcaccctgtatttcccctctcaaggctcctcccatttatattttacttgtttaacacccttctttgcctaatcggctcaatattcttttcccagtcaggcctggcttctagttggttctcaacaaatattactgattgaatgaattacacatgaaaatgaagcaaacaattgttgtttttgctggtgactaagtttccaagaaaaatttgaggtaatgaattggttcattaaaagtagaaatattttaaaaatgagcctcttaagtatttttctgaatgaacctttctttgccagcacagttgttaagagcaaccctgagccattaatgggcaggaacagcctgagacccctgtggagtcctgagtcaatgtgacattggcctctagtggacaaaattgagaatgcagcagctccaggtaaaagatgtcctgtggcactagtcacaactgaaggaaatgaaaatctcaacgtttcctttatttttcacttctaccatgcaaactgaattacattacattacattacaaggagagcccattgtcaaatttttgcctaaataattaaaaaaataaattcaatacttggcattctgagtattagtgtctagaaacatttattgacatcagagcctctacagaggcagagagtgagattttacaccacgactgagtgggagtcaattttcctaccttaattccctttttcctaaataatcttttccagcctcctggtattttcattgggattgcagggttgcaggctatcagacagtcttgagatagaagtgcattttatttttacatttttattcttaattttattttttaagagatggggttttgctgtgttgcacaagctggaatacagtgacaaaaaagcactggagatataacctgatctgggctaggtcacccctcctcaggcatcccggtggtgctctgctccaaggaggtcaccacattgacactgaacccacatgacagctcagaactcctgggctcaaacaatcctccggcctcagcctcctgagtagctggaatgacaggcatgcaccactaccacgcccagcaaggtgcattttaaaccacctgctagtcaaagggtaaatgttatctctgtaacaaggagagaaaaagctgagaccaaagaagggacacgtttaaataaaaagaggatgcaaatttgaggggtgaatatatgaactatttttgccttacaaacaaatcagatgacgatatgtatagtcattatttactttccttcttagcacactacctgatgccgtgagatcctggaacatgcaccatgtgcctatccggttctggcaagacgcttctagctgttttgacttcatttaacagcttctcatcactttgtaatctccaggttttttttttttgtttatttgtttttttgagatggagtcacgctgttgttgcccaggctggagtgcagtggcatgatctcagctcactgcaacctctgcctcctgtattcaagcaattctcctgcctcagcctcccaagtagctgggattacaggcatgtgccaccacgcccgactaatttttttgtatttttggtagagacggggttgcaccttattcaccaggctggtctcgaactcctgaccttgcgatccacccacctcgacctcccaaagtgctgggattacaggcatgaaccaccgtgcccggcctgtaatctccaggttttaaggccatgactgcccacttgcctaactcaagcccttataaatatccttaaatatctcttattctttatctgtatgcaggctgccgagcaagaaataaaatctttaaaaccaaaataattggcttaggataaagtaagctcacagagggaaagagctggcatagaacaaagcagaggcggcttctatgtgcactcctgccaggcagaggggcagcaagggacagcgagagctgtggcactctcccgaggacatgctcaggagtgaggccaacagcgaaggatgatgaactcccgatcagacccattcagatggaaacgaacagacaaatccacatgcctgggtaagactaagacttcttggatattggcccctggctctgttctcctccagcactttgtctgcagtgtgaaccacattcccagttgtggtaaaacagccgttcttagatcacatctgtataggatggggacttttgagcactttcctaaaccctgtttcccccaacaccggactttatacacatctgtaaaacagatggtgatcatgctcacatctaagtgcaatcgtaccagctggcatcaatatgaatataggaaataaaagcaataaggcctgtatttaataagcctctgacctcatgcactgtccccctctttcatcttcttttacttttttttttttgagacgcagtctcggtctgttgctcaggctggagcacagtggcgcaatcttggctcactgcaatctctgtctcccaggatcaaacaattctcccacctcagcctcccgagtagctgggattacaggcaacggccatcatgcccggctaatttttgtatttttgtagagacggggtttcactatgttgaccaggctggtcttgaactcctgacctcctgcctcggcctcccaaagtgctgggatttcaagcgtgagccaccgcactcagccttcttttacatttttgccagcacttgatgccaggaactctgtctgctgccaatttctattgggaatggaagccccattatcacagggggccgtccaggtggagccaggcagcaaaaccgtgcgctttctgggagccctccaggaaggacggacagacctggcgcaggcgccagcctggccctgctgccccagactcccaggaatacctaccatttccttgaatgcactttcaagcgctccgatgaccaggcactcatggggaatcttcttctcggtaaagaagcgtgtggggggcgtgctgggggagcccggggcccccacccctccgcgcagggaggctgcccgggtcagagtccggctgttggcgggcgtgttctcaggctcctcccccaggcaggtagggggcaggacggcggagttcttcaggatgtccacgatgtcctgcagctgctccgtgatgtggtgctgcagcaggcgtgacgccaccaccgcggccccggaccccgcgtgcccgtcaaacagcgaccaatagtggcaggaaacaccctcggattcctgtgggagaggacgacagggaggagtgagaacggctgtggactttgcctcagggtcatacagattgtgggacatctatgggactgagggtccacttggttgtctgtcgtctgcaaacaatgcggtcaaaacatagcaaacaaaacaaaataaaacaaacaaaaacaaaaacaaaaaaaacactcagggaagggtccccaaatgagccattgttgttactagcaccagaaggatgaagcggtctctgcctccccacctagcaagggagcccaaatgatcatacactaagctactacttggagggtgagatctactctaatttgaagtgtaggtgtttgcataaaactctcctacaaacagacaagtctgtacgagtccagcttgaacacctaactccttaactcccgtcttttttttttttttgacagagtctcactctgtggcccaggctggagttcagtggcgcgatctaggctcactgcaacctccaccgcccaggttcaagcgattctcatgcctcagtcttctcatgcctcagcctctggagtagctgggactacaggcgcgtgccaccacaccaggctaatttttttttgtatttttagtagagatggggtttcaccatgttgcccaggctggtctcaaactcctggcctcaagtgatccacccaccttggcctcctaaagtgctgagattatcccaaagggctgggattacaggcgtgagccaccgtgcctggaacctcccatctatttcaaccccagagtaggtttgatctggggccttggaaaaacgccctttctcaggttttccaacgggaaataagtagacccattttccccttttagagcccttaaatgctgggataattgtcccatctttcttggtctacatcctgaatttttagaacatgttttcaccctagacagccagtctagcccaggcctcacaagatgcagccaattcaaatctcctctttatacttcccacctcccttagttctccagctgatgtcactctcggtctctccattccttcttcttgccttacagctacatgcaacccgtgttccctcatctacgttgggtttagtggctgctggtggatttctagactacttcaagatgagcacttttgaacccatgtttgaattacacacgtgttagatcttagagaaaaggagctcaattatgacatagctgatagaatagagagctcagaaataaacccacacatatgttgtcaactaatctttgacaagggtaccaagaatacacattagggaaagaagagtgtctgcaataaatggtattaggaaaagtgaatatccacatgcaaaagaatgaaattgggccctattcttatatcatatacagaatccaactcaaaatagcctaaagacttagatgtaagacgtgaaatcataaaactcctagaaaaaaacatgggggaaaaaaactccttgatattggtcttggcaatgattatttagatatgatacccaaagcacaggcaatgaagcaaaaacaaacaagtgggactacattaaactaaaatgtttctgcgcagcaaaggaagtaatcaacaaaaccaaaaggtaggtagcctatggcataagaaaaaacccttgcaaagcatgtgtgtgataaggggttaattttcaaaatacacaagaaactcctacaattctattgcaaacaaaacaaaacaagcaagccgatgaaaaaatgggcaaagggcttgaagagacatttcatcaaagatgacataaaataaatggccagcaggcttgtgaaaagatgctcaccatcgatacctttcataaaactcagtgaactgaaattaaggaccttccccaaccagataaggggcatctagggaaaacctttagctcatatcatatttcatggtgaaatactgcatgctttcccataacactgggcaaaacaaaaaaagtatgctctcactacttctattcaatatgatactggaaggttctagataggcaagaaaaaagaaaaggcctaaagattgtataagaaaatagctgggcacagtggctcacgcctgtaatcccagctactcagaaagttgaaatgggagaatcccttgaatcgaggagaaggaggctgcaacaggccaagatcttgccactgtattccagctggggtgacagagtgaccctgtctcaaaaaaaaaagattgtttaagaaaataaagttgcatttatcctggctttgagcaatttgagcatgatgtaccttagtgtcattttcttcatgtttcatgtgcttggagtttgtctttctagatctgtggacttacagttatttcatatgatttagaaaaatttcacccattatttcttaaaaaaaattttttttggtatccttctctcttttctccttggaagaatctaattacacctgtagtagtccctagaggttgtcccatagctcattaaggatgctttcatttttttaatgcttcattttggttaatttctttttttttctttttttttttttttttgagacggagtctcgctctgtcgcccaggctggagtgcagtggcgggatctcggctcactgcaagctccgcctcccaggttcacgccattctcctgcctcagcctcccaagtagctgggactacaggcgcccgccactacgcccggctaattttttgtatttttagtagagacggggtttcaccgttttagctgggatggtctcgatctcctgacctcgtgatccgcccgcctcggcctcccaaagtgctgggattacaggcctgagccaccgcgcccggcccattttggttaatttctactgcaatgtattaaactcactttttaaaaatctttttgttttttattaaaaaacggacaaaggatctgaatagacatttctcaaataaagataagcaagtggctaacaagtatatgaaaacatgctcaaaatcaataatcatcaggaaaatgcaaatcaaaaccacaatgagatagcacctcacacctgttaggatcgctattatcaaaaaaacgagacaagtgttagtgaggatgtgtagaaaaaggaaacttctgtcctgtcagtgggaatgtaaattggtacagccattacagaaaacagtatggaggttcctcaaaaaattaaaaatagaaccatcatataaagcaattttactgctggttatataacaaaaggaaatgaaatcagtatctatagcccaacgttcattgcagcattattcacaacagccaagacactgaaacaaccttagcatccatcaacagatgaatggtaaagaaaatgtggtgtatattatttacatacaataagatattattcagccacaaaaagaaggaaattctgccatttgcaacaacatgaatgaacctggagggcattatgctaagtgaaataaaccagacacagaaagacaaataccacttgatctcatatgtggaatctaaaaaagagtcaaactcgtagaagcagagagtcgaatggtggttgccaggggctggggttgaggaaagtggggagataatggtcaaaaggtacaaagtttcaggtataaaatgagtaagttctggggatcgaatgtacagtatggtgactttagttagtaacactgtactgtatacttgaaattacctgagagagtagattttaagtgtcctcaccacaaacacacaaaaactggtaactatgtaagggaatggatgtattaacttgattgtggcagtcatttcacaatgcacccgtatatcaaatcatgcacaccttaaatacatgatttctgtcaatcatacctcaataaaactgggagaaataaaacattacatttgaaaaaatgtaactagaggggtaggatataaaacactaagaaaaataaatatttgggatctctattttcagaaaattggtggacaaagaggtaaggtatggatataacatctacttctgactagctggcttatctaccctatggcaataaatactgaaggctttttttttttaattgaagccattaaataaaatttttagtataatgctagaagacactgagtagatatggtgacatgaaccattactctgtgctctttaaaacttgatttccattcgattctgtgttaggtgctaagaaataaaatagctgatttttaattcaaccaatatgtgatttgagcactttctatgcaacaggctctggagtaggcagtagagataaaagactggctgaaagagatatcagacatggcctgatcttaatagtccagtggggaagacagacactgactgatacggtttggatttgtgtcctctgccaaatctcaggtcgaattgtgatccccagtgttggaggaggggcctggtgggaggtgactgcatcatgggggtggatttccccttgttcttgtgacagtgagtgagttctcacgagatctggttgtttaaaagtgtgtagcacctcccccttcactctcttccttctctggccatgtaagatgtgcctgcttccccttcaccttccaccacgactgaacgtttccctaaggcctccccagccatgcttcctgtacagcctgtggaccagtgagccagttaaacctcttttctttataaattacccagtttcaggtatttctttagagaagtgagagaacatactaagacactgatcaaataatcacacgtacaaacataagatcacaagtctgatcaaagagaggacaaggagaaattcttagtactacaaggccagcctgcagagggacaggacacattggagaaggcttcctgaggacatgaggactaggctgaggatgcatggaagttcatgagataaggaggggaggggagagaatcccaagcagtagcaacagcaggtgcaagggccctgcggtagaatgggggcatgatgcacgagcatagactcaaccatggccatgtggctgagtgggagagtgaggagcaagatgagggtggagagagaggtagcagctagaccactcaatatttacaggacacatgaaggatcctggctttagcataagtgtaacaaaaaaaaaccattgactgaagtaagaatgacaaaatcaatttatgtttttaaaagatcactcaagctattctgtgagattagaaaagaaataagggtgaaagtcatgatgctaaggtaggaggtaaatcctgccctaaaaaacattcagtcacattcaggccataagaaacacatttaaacaatgaaaagtgtcataaaacaaaggtaaaaacacaaagagctctaactcataggaaagaggaaagaacaatgattacaggtgagaagatttggattctaatcccatcttcaacaccaatcatcagctgagtggtggcaggacaggtgttaggccattagctggttgtcccttttgcttaacatttctatgccatggtttgttgttttttaatcccttgaactagataaaaacaagtttataatgagatgttaaaatcttcaatgtcctcctatgctaggaggatgtaaaaaagggacatactattcggggaaatacaaccacattgtgggctctgctatgtgcttagagttcagctcagctgttaaaagtgtaagagactctaaggtcagagaaacacatccagttacaggtccagaaaaaccttcccatcacttatttatgagacaaggtcttgctctgtcacccaggctggagtgcactggcacaaccacgacttactgaagcctcaacctcccaggctcaaatgatcctccagcatcagcctcttgagtggctgggactacaggcatgtgccaccacatccagctcatttttgtatttttcagagagatgaggttttgctatgttgcccaggctagtgaactgggctcaagcagtcctcctgccttagcctccaaaagtgctgggattacaggtatgagccaccgtgtctggccacccatcccatcatttaataaaccttatatagcaggcaatactctaaatgctttacaaatatgaactcgtttaatccttactccactcctctgtgagaggtgtggtaattatctgcattttatattgtaggaaaatgagagacagagaatataactgctctaggtcaccacctattaagttgtgcagcagggaccagagtctatgctttcagccatcaacctctatgctaaggtgaccacccctaccctaccaccagagggaaggttgccttaatttatacatagtgccatagtccatttttctactctataatctgagttgcaaccagagtgatttttcctaaaacacaacatttggtcattttcttttatgagtctaacagcctgctctgtgggctggctcctgtccgtgagcctccagtttgccgtctctgattgaatctctgatgatctccccacattctagcccttactcaaatcccacccacaccaaactacagaacttgcagctcatcacaaaccactaaccatcaccacctcctttacataactcccacctggctttcagtactcagcttaaatatcatctccttccagaagcccctacttcaccctgagcaccatctggacagcggccttgagggctagggtgacattccagtctggcaaagcagactgagaagcctccattttaccacctggtgggtactagtgagttgcaatgcctctgtacctaggagtgctatgaaagctggatggcaagaaagaagtgctagaatttaaaaggctcatgaaggactgcaagaggtgtttcaaagaactatatgaggccagagagggctacatgtgtttgaaatgtgaccaaaatattagagagattaaagatctattttcaaaggtggaatgatcaaataggttttgctgtacctttattttatttttctgagacagagtctgtcacctagtctgtagtgcagtggtgcgatcctggctcaccgcagcctctgcctcccaggcccaagtgattatcccacttcagcctcccaagtagctgggactaaggcatacaccaccacaccaggctaatttttgtacttttagtagagacagggtttcaccatgttggccaggctggtctcaaactcctggcttcaagtgatccacccatctcaacctcccaaagtgctgggatcacagaggtgagctaccaggcccggcctgtacacttattttaaggatatgaggattctcccttctttcctacctggttctcctcaaaatgatgccatcaactgccgtaagataggcaggatggtttgatgcataaagtcagatctgtgaacatgaaggaatgaatgtctcctcaatgtcacatgagcaggaggggccttcatcaaggttaggggtctaagccagaaataaggtggcctgggcaatgcaactgtgaatctaagagataggcctggggaatcacaagtggtatgaaggtgatgcttttaaagcatctgaaacctgcgatttcactgcaaatacacatgtattgcttcactgctcagaatcttcagttactccctactgcccttaaaatgccacttttttctcttagatgctgacatgtcttacagacactgaatgatctagttactattcactcttcagcacatctcttgcttccttcagtggtcctgaacttctctcatttcctctcttctaactctcagtgacctctggaactatgaccatcatgtttttcttctgcgtgaaacactgatccctatctctctgcttggaaaactatccttcggtttttggtggaagcgtgacctattccatcaagcctgcttggatcacctcagcccctgtgcatcccattttctgtacaccagtatgcatcagccctgctcacagagacttaggtgtgtctcatttgctctggtattcccaatgagtgtctggtacagaatagatgttcgataaatacttattaaatatacaaagaaagaaaaggagagaatggtttttattttttcaaagcaatacagtagcttggcaaatagggattttatataagacacttcacattggtaaaaccaatagaatatcataaccctaccctactccaggattggggatgacttgatcttgctttatttacccaggactgtgtcctctcagctccctgaggccaagtgtgccaagcaaataaggagtctgcatctgggaccctgggaatctcagaggggctccaaagaaacgaagagacattgccatctctggctgtacttgatttgctgagcctcgttcctacataaccagtatgaaactcactgtctccctctctctctcaatccaatctcttctgagctagggcatatccacccctcatactgttggcaaaggaggaacatctcctcagtttggtattaactctaagattttgtgtttatatggtaaatgaacaaggtttaagcatttacattatttaacagtccaagggcaattttagttattttaaatgctggatatttacttacgcattctcaaatgagttaaaacaaacatattctatctaccatgatatgtcttaacatagaaagaccacaggctttagatcaagacaaatctgggctctgaaatgtactactatgtgaccttggggaagttacttaacttctctcaactccatttccttatttgaagaagatgataaaggacaaggcaaaatggtggcacagacagtaagattacttcatgtaatggtacatgtcttggagcctcctttcctatgtgccaggctccatgctgggcactagagatacagcagaaaatgaaaatgtcatggttctcaagctcttgaactaacaatctagaatatgatcaggtaattacaagtgtgatgaatgttagaaaaacaaagtgcatggcatcacgtgagtggataacatgtattaaatgtgcagctaaccatggggtatggggggcacacgggaaggggtatggctatgaagggatagcaagaaggagttctctgtcatgatgaaactgctctgaatccctgttgcagcagtgatgatatgtatctatgcacgcattaaaattcatacaactgtataccaaaaggaaaaagttaattgtactgtatgttttaaaaatgataaaatgtatagcactgtattcagcacataggagtggcaaaaacactagaagtaatggtaattacttatactattaaatagcctggagggacactgagcaggtggggagaccaggctgcacatctgagctcctgacttccaattctgccaaatggtgtactcatctcgctctactgtgcaactcctgttgcttctgttcacctttcttatttcccctaaaggaagtcttagttcaaaggacatctgatatggtgtggctgtgtctccacccaaatctcatcttgaactgtagttcttataatccccacatgtcgtgggagggaccctgtcggaggtcattgaatcatgggggtggtcacctccatgctgttcttgtgatagtgagttctcacaagatatgatggtttcataatgggctttccctcccctttgctctgcatttctcctttccgccaccatgtgaagaaggatgtgtttgcttccccttccaccgtgattgtaagtttgctgaggcctccccagccatgctgaactgtgagtcaattaaacctctttcctttataaatcacccaatctctggtatgtctcagcagcgtgagaataaactaatacaaatctatcaagcacctatgtttaatccccctaacatcacaataaaattgttgtcactccattttgccaacagtgaaactggggtacagatagtttaagtaactctgctggtatgtggcagagataggatttgaacctagttcttcagactccaagttaagggatctttccctctccccagtgtcacataactttgtgtaattaatctcctcggcttctgttactgtgtggccttgcacttcagtgttgcttgtgttattttaatttgtttattgcttactagtaattgcatacgtgtctgattgctcaaatgtttcggcaatggctctgcattactcttccggaagcttcagaaaatgttgatggggcaccagcacaggatgcaaatcagacccttcataattagagtaacctagctcttgacataataccttcaaaattactcatattcattctaacaaatgtttaaccttatttttgctccagataaacatgagttaaatgtgtactccacttgaagaaaaacagtatcaagccccttcctgacttaccatataattcaatttggcagaaatcacttctgactcacaaaacaataactttgaggcagttttccagttgcactctaaattatttcatttacaaagaatcagtcttatatgcaatttataacacacaaatgcctacctacttctattcaggaatacatctgcagcctgatgaaggaagattccagaaggtgaaaaattgagagcttgaaaattcagtttctcttttagactttctctacagtaggctcactatcacattctcttctcgcaaaaggaaactgctttttaataattttattttctttttcccatttttcaaaaaatctagtatgccagaacttaatgagttctaactggaaaagactccttgggcctttcaacaaatacaagattgttccaaacagaaatctaactattaaacaaggagctgaagtcatttcagaaacaagcaggtggtgtccattcagcttcaggtatactgatcccagggccaaccaaagatgtcaaaaatgaccagcttaaattttagccctactcgaacaggagctacatcaacgtgcacctgaactccggggaatccatagactaaaacagccagcgttagccatctgggtggttgtgaggtacccatcccctctttatggagtgccaactgagaaggagaggttctagacataacctcagacgtttcctgtggagaccaacagaaatacccagatgtaggagaggaaatacacaaagccaaggagtggggtttgaggtatttgttccagcttaaggaaacgacggttttgccttcctttactcactgcacagagctctagagttttgcaaacctctttatccctcttcccctgagacgagtgctctccacacgaagcacatgaatgtgagggggaattggtcggcgtgtaagagacacgttagaaatgctttcctagttttcattcgggatgacactggcgccctcgcgtggtacgtaagtcaatcctccgcgtgcatgggatgctggtgctcttccatgcctgttagttttggtatatggcaacccattgcaggggacctgtgcccctaactggtgattatactactaaattttaaattaaaattattcctcacatagtagacaacaggttaaaaaaatttctgcaaagaaactacagatagaaaacatgagcaaataagaacatgtcagagctggcacttgatattcccaggaatgacaatccagtcatatctgacaatcatcatcatcatatctagccaaaatactctgaaacgctcaaggggagagttgaaatatggaattatactcgctattgttaatgatgaattttgccttgagatattagctaatgatagcaggaagtctttgctcttagcaagacagtaaatgagttactgtgtgaaaaacacttaaatcaatgcctggcatacaattaacactgtatcactgttagctgttgttattttaaaacgttgccttttcatctttattgcccttaaattattaaaacatttaaaaattttaaatgtatctttatagttttaaaataattatatactttatggatacacagtagtaggttatatatcaataaatgatcaataaatgaacaaacacattgggggtgcattttttttctaagagacaaggtcttgctctgtcacccaagctggagtgcagtggcatgatcatagttcactgcagcctcagtctcctgggttcaagccatcctcccacctcagcctcctgagtagatgggaccatgagtgcaccaccacaccaggctttattttttatttttatttttgtagagatgagttctccttattttgcccaagctagtctggaactcctggcctcaagctatcctcccacgttggccgccccaagaagctaggactacaggcatgtgccaccacacctggctaatttttaaattttttgtagagagggtcttgctatgttgcccaggctgggtctcaaactcctggcctcaagtgaccctcctgccttggtctcccaatgctgtgaaattacaggcatgagccaccacaccctgccaaaaaaattgtttttaacttacgatttggagactgttaatttagaaatagttgtctgaagggaaaaagtggtatcctcctggtagcattcacaagtccttagcttatttaatattattcttccctttgccaccctaactattcaggtatttatacaaccggtggaggggccatatcaacagcaggaaaggcctatcacaaatgtagaaatcccactttgagtgacatctcatcgttgattttacaaaatgtcctgtatgagcacagaatgcactttctaccccgtctctcccactaccaaagaaaagggattgatcacttccccttggggaaacagagttgccatatttttctgtttccccactatatatgtgattatatggtttgatttccacaaactttctggccagttttccaggaatctcagtgaagatgataatgcacagtccagagtatctgctataggcattccatccacagggctttcaatgtccagttttccatctgatcctcacagtaccacagtgaaagggagaagaataagccaatgaggaggtagagatgagaaaacatttgagtgacttcatgaaagaccttcctagggctcacgttctattgctgtccacatggagccatgaccctacagcgttgttcgctttttaccatacctctttttttttgactaaattgttcggatactctgctctgcagtggaggaaaaaaatcccttaatttcatatactttaatgaatatgctgcttccttctcaggatatgacaatatgaattgcaggtttctttggttcaattcctccaacataatgaggcagtaaggtgcaggataggtttagtaagtttgacttttgtttttaaatggcaatttagacctgtcttaaaacattaatttataaaaggaagtacaaagtttataacggtttttgctaaattgcattgtgatttattctagaatcaactcgagaatattcttaaactattagtttatacatcaacaacttctccctaaattagtttatggaaaaaacataagtactgtgaaataatactgaagtgcagttgccaatccactattagaaacaacaacaacaatagataatatttattgagcacctaccccatgcactattctaagcacttttcatattttaactcacttcactctaataagcctatgaaatagtacctgttataaccaatttacagatgggaaaattgaggtatggagaagccgactgacttgcacaagataacacatctagtaaggggcagaggcaggattcaaactcaggtattcatgcttatccaatcagagggcttttttttcttcccatggtttatgcaaatgatggtctttctataatttagcaagaaaatggactataaagagaagatgataatttcattttagctctgtttttcatcttagtaacagctattacagtttctgagttgacaggggacactgctaactaactcccatatcaaaagagaaatcataatggaaatgagaaaatatttagtgtcaaattttattgaaattatacatgtcaacattaggagttattcttccttgatgtctgactttctcaaagagattttcctgctccatgtctcaactgctaatggatacagaggcagcatggtgtaagtctagacactgaggccagactgcctgggtcgaatcaagatctacactttctagctctgtgcctcagcttcctcaccagttaaaaaaggcaataataatacatatttatgcacatattacagtttgggcactcctaatccaaaagtctggaaaatgctctgaaatccaaaacttttgagcacggacgtgacatcacaagtggagaattctacacctgatctcagtgggtcatggtagaaacacaggcacactacatttggtttatttagcaaccccatggagaaataagactaccttcagactatgtgtgtaagctgcatacaaaacactaatgaattctgtgtttaaacttgggtctcattcccaagatatctcattatgtatatgcaaatagtccaaaatctgaaaaaatctgaaatccaaaacacttctggtttcaaacattttggataagggatacttagcctatataaggttaaataaattaataccagcaaggcactaaaatcggcgtctggtacacgagtgctgagtattatttatggttttggtttttttttttagaagaaatgaaagaagaaaataaagtttattgcccttgacaatgttcttcccacttaaagctgtgggaagtcagattataagtgaagcaagaagaaatttccatctcaacatgatttattttccttgcaccttacattttgccacagtgggaaactatagtgaaaccatgttgtgttctcagctactatgtacattttggtcaaacctggtcttcagagtaatccaacacccaccaataaggggcctttaaagggattctagctgacatcagcctcctcaattcctggttttaaaatcatccatcttaatcactggcaagagttctatgtccctagaactaaaagagttttgaaagaaaccactgcattactaaaaaaaaaaaaaaaaaaaagaaaaaaaaaaaaactaaaaaaaagaaaaaaaaaaaaaaaaactggccaggcgcagtggttcatgcctattatcccagcactttgggaggctgaggcgggcagatcataaggtcaggagatccagaccatcctggctaacacggtgaaaccccgtctctactaaaaatacaaaaaattagccgggcgtggtggcgggcgcctgtagtcccagctacccaggaggctgaggcaggagaatggcgtgaacctggcaggcggagcttgcagtgagccaagatagcgccactgcactccagtctggacaacagagagagaccctgtctcaaaaaaaaacaaacaaacaaacaaaaaaaaaactaagaagaaaagaaaattcttattttcttcacatgtgcagaacaaggaacaaaattttagcataataaaatgagatgaataaaaggctgctcctattgcatttttatagctgacatcattgcagggagccaactgcctgatgagggcgaaatattccaaagggctgctgttgtagaaccagaagcaaccttcatttcatgtttcgggggtgaaagagtacttcttacaaaaacagataaaaagaatggcaaaacctcagttcggaaagttgaaatagtccctttctcatgttccttttgcctttccctgccccattttgatcctatttgcctggagttcccacagtgctgccccgtcctctgctgagaaagataatcagctttcctctcccctgctgatggtcttggccgagatgctgacacagccatctcctgttattgtaattagacactgaactagcagatactgaaaccacacactttgatgtgttttggctaaattaaacaacacaagggtgctcctaaggaagtagacttggaatgcatgtgttcagaagtctagtctcaagccaaaaacaatctgttcgaaatagggagtcagacgtgggcaaaaaaatttcctggttatggccacaataccctaaatatttcccacccacgcatcttatgtaagtacacgcacttcttaacactaggttatgacatgcctttcagagtgatctctttctccttccacagagaagtcacttggtaccctcctcctcttatctcattcctggaatgactaaatatttgggaactaagaagaaaaagctcttggaaaagctgtgttttcacctgagtatggcaatcagtatgataaataaagactctttataaccttccaagtcaaaggaaagaagagctagcaatggtgattcatgtgcacaaatcttgagctggttaattaaaaagccttctgtgggaatcaggaggccattgggaataaggtattgtcctcaacaagcttacagcagctttcctaagagacagtctcatgaaagtgtcttttggaagtgctagaattgtagatttccttctttcctggccacccatcctgtttccaaatcagttctcagaggtaggcatgtcaagaggcttgcacattgccaaagagtatctatttgctatttgccagactgtgggcttatagctcttcacattaagctacccaaaaatgatccaggcacaagaaaagttccaccttcatttgtcattgagaacgcccttctctactatactacatacctgcttcatcaaatatctcaaaatgttgctttttctttttctttttttttttttttttgagatggagtctcactcagttgcccaggctggagtgcagtggtgtgatcttggcccactgtaacctccacctcctgggttcaagcaattctcctgcctcagactcccaagaagctgggaatacaggcatatgccaccaagcccagctaattttttgtgtttcagtagagacggggtttcactgttttgcccaggctagttgcgaactcctgagctcagggaatccaccttgcctcggcctccaaaagtgctgggagtacaggcgtgagccactgcgccggccaaaacattgcttttttttttttttttttgagatggagtctcactctgtcgccaggctggagtgcagtggcgtgatctcagctcactgcaacctctgccctccaagttaaagtgattctcctgcctcagcctcccgagtaactggcattacaggcgcctgccactgcacccggctaattttttgtatttttagtaaagatgggttcaccttcttggccaggcttgtcttgaactcctgaactcatgatccacctgcctcggcctcccaaagtgctgggattacaggcgtgagccaccgtacctggccaaacattgctttcttaaccccaaaggagaaatgtttattgtttctgtattataagttatatcactaaactcttaattaaaagacaaaacagaacaaaacctagatccattcaagagtgttggagatggagactagaaaacttcaaccacatccccttacatttcttcaggctaaaatactacagtgcagaacaccttaaaacatttaaatttgtgtgccttttaagtttgttttgttgttgttgttgttgttttacttatttcaaacattgcttctttagctcctgactttttacttatatgcagatgaaacccgaaattaatttgtattttatttcttttaagtcaggtgccactgtcaagagctcaaacacgagtcggttccaagatggccgaatggaaacagctctggtgtgcagctcccagtgggattgatgcagaagacagtgatttctgcatttcgaactgaggtacctggttcatctcattgggactggttggacagtgagtgcagcccaaagagggcgagccgaagcagggtggggcattgcctcacctgggaagcgcaaggggtcggggaattccctttcccagccaagggaatccatggcagattgtacctggaaaatcaggacactcccgcccaaatactgcgcttttccaatggccttagcaaatggcacctggcttagcaggtcccacacctaagaagccttgctcactgctagcgcagcagtctgagatcaaccggtgaggcagcagcctagtagggggagaggcgtctgccactgctgaagcttgagtaggtaaacaaagcggctggggaagctcgaactgggcagagcccaccacagctctgcaaggcctgctgcctctgtagaccccacctctgagggcagggcgtagatgaacaaaaggcagcagaaacttctgcaacttaaaagtccctgtctatgaagagagtagtggttctcccagcacagagtttgagatctgagaatggacagactgcctcctcaagtgggtccctgaaccccgagtagcctaactgggaggcacctcccattaggggccgactgacacctcatacggctgggtgcccctctgagacaaagcttccagaggaacgatcaggcagcaacatttgccgttctgcaatattgcggttctgcagcctccgctggtgatacctaagcaaatagggtctggagtggaactccaggaaactccaacagacctgcagctgaggaacctgactcttagaaggaaaactaacaaacagaaaggaatagcatcagcatcaacaaaaaggacatccacaccaacaccccatctgtaggtcactagcatcaaagaccaaaggtagataaaaccacaaagatggggaggaaccagagcagaaaagctgaaaattctaaaaaccagagcacctcttctcctccaaaggatcacagctcctctccagcaacggaacaaagctggatggagaatgactttgacaagctgacagaagtaggcttcaggaggtcggtaataacaaacttctccaagctaaaggaggatgctcgaacccattgcaaagaagctaaaaaccttgaaaaaagatcagatgaatggctaactagaataaacagtgtagagaagaccttaaatgacctgatggagctgaaaaccgtggcaagagaactacgtaacgcatgcacaagcttcgatagccaattcgatcaagtggaagaaagggtatcagtgatggaagatcaaattaatgaaacaaagtgagaggagaagtttagagaaaaaaaagtaaaaagaaatgaacaaagcctccaagaaatatgggactatgtgaaagaccaaatctacatttgtttggtgtacctgaaagtgacagggagaatggaaacaagttggaaaacactctgccaggatatgatccaggagaacttccccagcctagcaaggcaggccaacattaaaattcaggaaatacagagaccaccacaaagatactcctcaagaagagcaaccccaagacacattaattgtcagattcaccaaggttgaaatgaaggaaaaaatgttaagggcagccagagagaaaggtcgggttacctgcaaagggaagcccatcaaactaacagtggatttctcggcagaaactctacaagccagaagagagtgggggccaatattcaacattcttaaagaacccagaatttcatatccagccaaactaagcttcataagtgaaggagaaataaaatcctttacagacaagcaaatgctgagagattttgttaccaccaggcctgccttacaagagctcctgaaggaagcactaaacatggaaaggaacaactggtaccagccactgcaaaaacatgccaaattgtaaagaccttcggtgctaggaagaaactgcatcaactaatgggcaaaataaccagctaacatcctaatgacaggatcacattcacacatattaaccttgaatgtgaatgggctaaatgccccaattaaaagacacagactggcaaactggataaagagtcaagacccatcagtgtgctgtattcaggaaacccatctcatgtgcagagacatacataggctcaaaataaaggtatgcaggaagatctaccaagcaaatggaaagcaaaaaaaaagcagggttgcaatcctagtctctgataaaacagactttaaaccaaagaagatcagaagagacaaagaaggccattacataatggtaaagggatcaattcaacaagaagagctaactgtcctaaatatatatgcacccaatacaggagcacccagattcataaagcaagtccttagggacctacaaagagacttagactcccacacaataataatgggagactttaacaccccactgtcaatattagatcaatgagacagaaggttaacaacgatatccaggacttgaactcagctctgcaccaagaggacgtgacagacatctacagaactctccaccccaaatcaacagactatacattcttctcagcaccacatagcacttattccaaaagagttggaagtaaagcagtccttaacaaatgtaaaagaacagaaatcacaacaaactgtctctcagaccacaatgcaatcaaattagaactcaggattaagaaactcactcaaaaccgctcaactacatggaaactgaacaacctgctcctgaatgactactgggtacataatgaaatgaaggcagaaataaagatgttctttgaaaccaacgagaacaaagacacaacgtaccagaatctctgggacacacttaaagcagtgtgtagagggaaatttatagcactaaatgcacacaagagaaagcagaaaacatctaaaattgacaccctaacatcacaattaaaagaactagagaagcaagagcaaacacattcaaaagctagcagaaggcaagaaataactaagatcagaacaaaactgaaggagatagagacacaaaaaacccttcaaaaaaatcaataaattcaggagctggttttttgaaaagttcaacagaattgatagactgctagcaagactaataaaaaagaaaagagagaagaatcaaatagatgcaataaaaaatgataaaggggatatcaccaccaatcccacagaaatacaaactaccatcagagaatactataaacacctctacacaaataaactagaaaatatagaaaaatggataaattccgggacacatacaccctcccaagactaaattgggaagaagttgactctctgaatagaccaataacaggctctgaaattgaggcaataattaacatcctaccaaccaaagaaagtccagaaccagacggattcacagccaaattctaccagaggtacaaagaggagctggtaccattccttctgaaactattccaatcaatagaaaaagagggaattcttcctaactaattttatgaggccagcatcatcctgataccaaagcctggcagagagagacacaacaaaaaaagagcattttagaccaatattcctgatgaacatcgatgcaaaaatcctcaataaaatactggcaaactgaatccagcagctcatcaaaaagcttatccaccatgatcaagtcagcttcatccctgggatgcaaggcttgttcaacatacccaaatcaataaacataatccatcacataaacagaaccaatgacaaaaaccacatgattatctcaatagatgcagaaaaggcctttgacaaaattcaacagcccttcatgctaaaaactctcaataaaccaggtatcgatgtaacttatctcaaaataataggagctatttatgacaaacccacagccaatatcatactgaatgggcaaaaactggaagcattccctttgaaaactggcacaagacagggatgccctctctcaccactcctatttcaacatagtgttggtagttctggccagggcaatcaggcaagagaaagaaataaagggaattcgattaggaaatgaggaagtcaaattgtccctgtttgcagatgacatgattgtatatctagaaaaccccatcttctcagcccaaaatctccttaagctgataggcaacttcagcaaagtctcaggatacaaaatcaatgtacaaaaatcacaagcattcttatacaccaataacagacaaacagagagccaaatcatgagtgaactcccattcacaattgctacaaagagaataaaatacctaggaatccaacttacaagggatgtgaagggcctcttcaaggaaaactacaaaccactgctcaatgaaataaaagaggacacaaacaaatggaagaacattccatgctcatggataggaagaatcaatgttgtgaaaatggccatactgcccaaagtaatttatagattcaatgccatccccatcaagctatcaatgactttcttcacagaattggaaaaaactactttagagttcatatggaaccaaaatagagcccacattgccaagacaatcctaagcaaaaagaacaaagctggaggcatcacgctacctgacttcaaactatactacaaggctacagtaaccaaaacagcatggtactggtaccaaaacagagaggcagaccaatgaaacagaacagaaccctcagaaataacaacacacatctacaaccatctgatctttgacaaacctgacaaaaacaagaaatggggaaaggattccctatttaataaatggtgctgcgaaaactggctagccatatgtagaaagctgaaactggatcccttccttacaccttatacaaaaattaattgaagatggattaaagacttaaatgttagacccaaaatcataaaaagcctagaagaaaacctaggcaataccattcaggacataggcatgggcaaggacttcatgactaaaacaccaaaagcaatggcaacaaaagccaaaatagacaaatggaatctaatcaaactgaagagcttttgcacagcaaaagaaactaccatcagagtgaacagacaacctacagaatgggagaaatttttgcaatctacccagttgacaaagggctaatatccagaatctacaaagaaacaaatttacaaggaaaaaaaaaatcaaaaagtgggcaaaggatatgaactgacacttcttaaaagaagacatttatgcagccaacacacacatgaaaaaaatcctcatcatcactggtcatcagagaaatacaaatcagaaccacaatgagataccatctcacaccagttagagaggcgattaaaaagtcaggaaacaacagatgctggagaggttgtggagaaataggaatgcttttacactgttgggagtgtaaactagttcaaccattgtggaagacagtgtggtgattcctcagtgatctagaactagaaatatcatttgacccagccatcccattaccgggtatatacccaaagggttataaatcatgctaccgtaaagacacatgcacacgtatgtttattgcagcactattcacaatagcaaaaacttggaaccaatccaaatgtccatcagtgatagactggattaagaaaatgtggcacatatataccacagaatactatgcagctataaaaacagatgagttcatgtcctttgcagggacatggatgaaactggaaaccatcattctgagcaaactatcacaaggacagaaaaccaaacatcatatgttctcactcataggtgggagttgaacaataagaacacttggacacagggtggggaacatcacacacaggggcctgtcgcggagtgtggagcagggggagggatagcattaggagaaatacctaatgaaaatgatgagttaatgggtgcagcaaaccaacatggcacacatatacctacgtaacaaacctgcatattgtgcgcatgtaccctagaacttaaagtataataaaaaaaaaataataaaatgccaaattaccaccaattacaattaaaaaaaaagagctcaaacacaggaaatgacattccttcagtaaatgcctcatggaagctgggagaggcagaaaacagttatattattttctctaccaaaaaaaatgtgtttaaggtttgctttaaaatgggaggctgaaaaggataaaataattctttatgaattggtatttgggatggctaagagttgtctttaaatcttaacaccaattcattattatctgtagtagaaaaggtcatctcgctgggtgcagtggctcacgtctgtaatcccaacacttcaggagcctgaggtgggcagatcccctgaggtcagaagttcaagaccagcctggccaacatggcgaaaccctgtctctactaaaaatacaaaaatagccaggtatggtggtgcttgccggtaatcccagctactcaggaggatgaggcaagagaagagcttgaacctgggaggcaaaggttgcagtgagctgagattatgccactgcactccagcctgggcgacagagtgagacttcatctcaaaaaaagaagtcatctcgttgctacccggctaccatattgccactcaatataagaaaggtcatgaaatataaagtcacacttctattgaaatcctctgtacatcactgatgtttctaacaaataaaaaattcctataatactgttttcattgtaaatttcatgttattttattaaaaattttaggttttctttaacctccaaggaaggtgaagatatattatacatgaaagaaatcttttgaaaacacatattttgactttactaaatttacaggggacaaaagaggtcaagaaaggagggagaaattaagcatatgtattccagagggacttcatgcatcttcggtttgccatccttcatgcctgtcaactctgtttgcagataaaaccatgatgccattatttatcctgttgttccattttttgcttataacattatatgtccacttttcccatccttatctttcttatcactgtgtggcccatgccatagataccttccctcttcacagtacccctctcttcttggagcttctagaaccccactgtcatcatgtttctgttacacacttttataccttctgtgtcacctaagccacttctatggctgcaactataattttcaatcttgtaactccttaaatctaagcctccttaggcttgtgtgtgagctccaaacccttatttctaatttcctacaaaacactttcacctggaaaggtagaatcagaatcagtatactcaaaacgcaagtcatcatctctgcccatccccttaccatccagtggtccacttttcagtgaccagcacctagtggctgagcctggtaccttcatcttctccctgttccaagcagttggtcatttgctcaccttaactgtatctctcatttaatctcttctgagcctgtcccttgcactgatcagtgccttattttaagccgttatcatttctcacccatatttctgcatgagcctcctaactagcatcccagcctctaggtttggactcctggccttcccaagtcagccttcccactgccatcactgtcttgagtcatcttgcccttgtctaaaatactttggtaaaaatcccagcttattatggtgtatgatgacccttgtgatgcctgcttactcttcctgtcttgccaaccctccaagagaccatatattttccaaaacacaggaagacatgcctcatgtgctctcatgccaacctgtctttgcctatacatgttccttctataagaaacccccatttcttttgttagctcgctttacttctattcactttccaagatcccagctctaatgtcaatttctcaaggaaggctttcctaaccttacccatccccttctccttggttgttccccaaatcatcagtgaccaaaatgagtcagacttccctacaacctgggcttttcatctgtctctgaaaactcactccattgtagtaccactgccagtgatctccccaatcgactcagcattaggaggatgggaactatgttgtgttttgtctccttatcccaaagctcagcatgcagactcagagttcaatatgttcagtgggtgagggaacaggaagggtgggtacaatccgctttacttatctctgtggatgttttcttgccctaagccctgtactatcaccatcctttcctaagtgctaccatatttgagttttaccattaagggcatgtcttctagatgggaaaaatcactggcctcttttaaccagtgtgtccagtgtcctctgctagtaaattatagaagtggaagccaaagtcttgacagtgaccttcaatgtccttcccgactggctcactccactcctatgacttttctgacaacatttcctgcaatccaggctttacagtatttctgctccaaccacacagacctccttcctaaaccctgagaacatagggccggctcccaccttggtgtctttcaattgtccagaacgataaatgctcttccttcaaatagctgcaatttcagatctttgcccaaatgtcaccttctcagtgatgccttcattaactaccccggcaccctcagacttcctatattctgggttccccactttgttttgtatctccatagtgtctatcatctggcacactatattttgtctccctctacgaatggaagctccctctaagtagggattttgtctatttcattccctgccaaatctccagcatccagttctcagtacatagcaggtgctcagtgatttatcttcctcactaggtaatggttttcaaatttttaaaaagcagcacaaacaaaaataacaacagaacagacaacccaatttttaaaatgggcaaaggacttgaatagacatttctctgaagaacatatacaaaggtccaataatgaaaaaatgctcaacatcactaatcattagggaaatgcaaaccaaaagtacagtgaaatactacctcatacccattagaatgattactattaaaaaaagaaaacagaaagcaagtgctggtgaagacgtggagaaataggaacccctctccattgttggtaggaacgtaaaatggagcagccactgtgaaaaacggtggtagtccctcaaaaaattaaacagaattatcacataattcatcaaatcctcctctagatatatagccaaaagaattgaaagcagggactcaaagagatatttgttcacctatgttcacgacagcattattcagaatagctgaaaggtaaaaaattctggctcacattacaacatgggtaaaaccttgagaacattatgctaagtgaaataagccaggcacaaaaggacaaatagtgtatgattctacttatgtgaggtacctgcagtggtcaactcagagacaggaaatagaatggtgggcaccaagggaggaaagaatggagagttagtgtttaatgaatacatagtttcagcctgagaacctgaaaaagttctggagatgatgagggtgatggttgtacaaacatgtgaatatacgtaatgccactgaactatatgcctaaaattggtaaattttatgttatgtacattttaccacaatttaaaaaaaggaaaagaagctcaactcttgtcttaaactcagtaagaagcctaataggtaaagcagacagaaatgaagctgctgtggtcggagcaggactggggcaccagggtgtctccactctgctggtcccttgctcttgaaggacggaccccacagatattgggaaccaccacaggggagggccacagctccatcccaaagtgcttatgcaccagtttcactgttcttaaggacaagaagttaaaaagtcaccccagctccatttctagaaggaactcagtaaaaaggaaaaatgccatcaccaactggccttgggccatatgtcaacactgactgatttttacagagatcactttatatcccaggggcagggggaaaatatcagtggaaagagcaacactaagtcactggcgcccctattcaatgatcatgaacacttcacgctttccaagccctttcccataataacaatcctcaaaacaatcctgtcgagtaggtatgaaaggaattgtgtaatctctaattcacaagtgaagaaacatgcaaacttcactcatagagaataacgaagtgggactaacctcaggataataatcactaacgcttattacagatttattaagacacatgctcaacattttccacggactactggagttcatatttccaatcagcctccttctaccatttggtagttactgctgttattcctttatattttatttatttatttatttatttaatttttttgagacggagtctcgctctgtcacccaggctggagtgcagtggcgtgatctcagctcactgcaagctctgcctcctgggttcacgccattcttctgcctcagcctcctgagtagctgggactacaggcacccgccaccatgcccggctaattttttgtatttttagtagagacagggtgtcactgtgttagccaggatggtctcgatctcctgacctcgtgatctgcccgccttggcctcccaaagtgctgggattacaggcgtgagccaccgcacccagcctgttattcctttttagagtagacaaaactgaggctcaaagaataaccatcccaaaattaagtagctaaagtggtagactgcacagtcatctcactccagggcctgggcacttaaccatcaccattctatactgcccatctgggtcctcagctctggttgtttggaaaaggccttccttcaacctagaaaatatgtacaattgataaatccccgtaagtcaactttaaattaaactaggactaacaaaataaatcaatacttatcaatccctgagcatagacgcaatgaaacactatttctttttctttttctctttttgagatggagtctgcactgtcgcccaggctggagtgcagtggcgtgatctcagctcactgcaagctctgcctcctgggttcacgccattctcctgcctcagcctcctgagtagctgggattacaggcgcccgccaccatgcccagctaattttttgtatttttagtagagatggggtttcaccatgttagccaggatggtctggatctcctgacctcatgatccgcctgtctcggcctcccaaagtgctgggattacaggcgtgagccaccatgcccagccgcaatgagatactatttctaaaactaagaaaagattcctagatcttttaaaatcctatgaaaatttttacacaaaaatatcctcaagatgatcagaatgaatagtcacatttgggtcagtccattctgtgtctcctgattttcccaggaaacatctctctctaaagcacatcatctgctggcagacagagtgtcaatgactccccgtcctttgctgagagcttcttcagagctttctgaggatatgactgctttattccccagaaactggagacaggataaatattttgtggtttttcaacagtgttcagtctgcaaggccaccccatgggctgcaagagttttgggccaattgaaatagatatttatttggaagaacatcaggcacaggctgcaaatggatcatgagcaggcaaggaggagaaaggggcagagtcatggcagggctcaaagcaacagccagagttacttccacccctcatgagaggctttcggactatttccttacaaagacctagaagtggctcctttgaaaccgtcaaacattgtgtgtgtatgtgtgtgtgtgtgtgtgtgtgagtgtgtgtgtatacgtatatatattcgtgtatatatatatacacacatatatatacgtatacacacacacacacatatatatgtgtatatatatatatgcacacacataaatatatcaattattgcaacaagagctagatacatatggtgtgggtgtttcatttactttgtgttaaaaacctaaccacaagctggtcatacatgtgtcgccttcagcttggtatgtgtgatgtcgtgacgataggcccgccaccccactaactctggggacactgctttctcacttccattccagatttaggtgaagccctaatgtcttccagtgggaccaaagtgtgtgccattcttctcacctgagaaccaaggatcgagaagggtcttaccgagttctccttcagctgcagcccttccccattgggaagggaggaccgtctcttggatgagttcctgtttggggttgaggtcacggcccctgccttcttcttcacagtgagcacctcacagctggcttggtcttcattgtgtgtgctcttcccggcattgataaccctggagaagaagccggaaaagctggtcagacagaccgataaagctgagggcacagtcccttgtcaagggtcagccaagacagtctctacaactggcccagaactacagccctgcttaatgctaagaacattatggtcttggtattttatgttcccaaataaatgaaaattttttaatggcattatgttagcacccattaaaatatttactaaagaagttgttttgagacctgttcacccacaggtgtctgatagatgtgatcaaatacactaatccattttagtcaaaacacatgaggcaatcactctttcaggttaaggaacctgaatgtttcggcaattacaatgaagacagataatctgactcagggaattctgtttcacttctccaagtgataaacagcaaaaccaccatcaatcttatcaaggtacatggcagtaacttacagcatgtcgtaaaaatccaagagaacagagaaccatatttcactacggccatacccccccatttttgctttacacaaaggcaagcaaatgggtcaaaggtttactcttttaaaactatttttaactcttggtcttttttcatgtagaataatactcatcacactgggctataggcactctgatttggacaccaagacacataataataaggcatgttgacactgctttgctcgaattactacatgttttaagcatagaaatgcttcaggaaaacatgctgcatcattcatgcacctttttctctatcaggtgactatagactcaactcttgggtttccgcaccgctttcttcttaagtaattaagcagcagctaaaacagattcccttaaagagttctccttgatctgccactggctgcgtttcctttctaaagcttcaacagtgtcacagtcctgacagagtgagtgtggagtttatggaactcagtagcaaggaaagaaaaggtgtgttttttctttttaaggtaagctaaataaaaattagctctataagtgtggtgtgtacactgctctattgattgagttgcacagcctcctaacagttcaaaatcattattttcaaatgactttttaaaaaccttttcattctacaataattataggctcagagtaaattgcaaaaatagtacagagtcccatgtagcttttgaccaattccccaaacggtaacatcttatataagacagtacaatatcaaaactgagaaaatgacattgatacaatactctcacccagactcctgaccttattcaaatttcaccatttcttacatcaaatagcttttagtactaaaaatggtatcaatttccataagccaacacacacatgccacaaccaaataggaaatggaaagcaaattgagatttgagtgccgcaagatgtaagcgagcgtgtttcaaagcacacttctgccaaactctggaactctatggaggtgtttcagaaattttaacattttctttattttaaaaatgtatacacatttttaaaaaatgcaataatttaaaagttcattcccatctgtacatgtgatcaaataaatgcaagttgacatattttgggcagctttagcatattaagccatctatcttttcaattgaccatatcattgattggaaggagaattttttttttaactactatttgcaattacttatctgaaagttctaacgaaaagatcatatcagtcatctatttcctcaatttcaaatttctgtatcaataaaaagggcttcgctggtcctatcgggtttactactaatttcaactttagcatatttctataaacaaaagcctatgtttacttatttcacatattacagtatttcctaagatttgtctttaagtggactgttgcttacaaagtttgacaattgttgtcctggggcttgtcaaattggcctcgggggcttatcacacactctcaggggctgagcagtggggaaagggaggattcaatgtctattttcttgtcccaccttcaaggaaatgcatttcctctttcctctaaggaaagacattttcatatggcttaaggataaaatgtaaatattagggacacaatgaggctacctgcatgatggttaatcctaccgcatttactgcctgagctaagcaacttatcagaagctccacagccaggaagtggcacagctgggattcagaatgagcctatcttgacccctaacccaacctcttcctattgtgccctggggacatcagtctgtgacaggttgagctggactgtggggaagcatagaataaaaaaatcaggcaaggtctggtccaggcctgagagggcgggcctttcccagcatctctggctattggaggagtctgggaaaaggcccaggaaagaggaaagaacaggtggctcagatctgcctgtccctagagaagctcatgctatccaggccaagtcactgggggggcctgctgctgaagctcgtagtacagaacatgcattcgtctggaacgtgccttttacatctctcctcagagaaccaaaccaggcagaggaaggaggtccaaaataccacctgcctcctctcggtcactggtggtgacttcccaagcaacatgtttggggtggattttttactgggtgatgttataccaccatggtgtcccaaatgtgcgccttccctggggaaagctcaagtgggggttcagctgggaaaacctgttcatgacaaccatccctccatactgtcatccgtacaagatcctggatgctatttccagaacttggcatcactctgaccactggcacctaatcttgggctgtagaaaggtgttttttcctttggtttcgttttttgaaccaaaaaagcatcgctgatctccaacagctacatgccaaggtgactcatccaccactgccgtttccaacagacaacaaagctactataattacataaatcacgaatccctgtccccttaacgtgcttcgtctcctgtctttccctgagtggttattaaactccaaagttgacctaacttcagcaagaggtcttagaaacttcattgcatgcatatgagaaaaccagtgacctggatgatcatgactggcgcaaggtcacacagctaaatgcgaacacacttgggagttctgagagctttctgcttcagctcttgggttgttttattttcctattgtgcatctattcttgtcggtgcctggttcagaggtctgtcctgcaatgactcaaacccagggaactgtgaaagaacaattactggtgcccttactttgccatttcatgttgaacgtagcttatgaatagcactaatgaagtatcagacagtcagaaatgtcaatctaatgggaagatggtggtcccacctatgtaagcctgttttgtcagaaacctgattaccattcagatgataaaatattaatttaaatattaaattttaaatatcaatttaaagtcactgtgtttaaaaaaaaaatgccacaactcttatcccctattttatattatttcaactcccctactttacacagctttagtagaaaggcctcattcttctcaatctcatttggctctaacaagtttgaccagtatcaacttaaatattttattttgcacttcaaaggtaaatgctttgttaactatatgtgaacaaaatctttaattttataaaaagtaattgagaaaaactttgtttcacaagctgaggagcagcatgctgttaacagattcaacagattccttaaaggcaagcaggtggaccaggggcaccactccattgctgtatgctccagcgtaaagtcagtaccaccttgaggtcaacaggaaaaacgactatgctatctacattcttggcctaaacaatacttacgcatgatgcttattttgaaggctttaaagaaatgctggtggaccacgaatcatcatacctttggtcacattattttccagtttacaaagagggaaagtatttttctggaaattaaactggaggtaataagtcatggtggttcttaacaaaaactatctccctagaatacagcacatagcaggtgctcaacaaatgtttactgaatgaatgaatctgacagaaatcaactctgctacttcctaggtgtggataacagtatctcacatttgttgagaactatgtatgagccagagactgctgttaatattttgtagaaagtaattaactcatttcatcctcttgtcaactctataaggtagctgccactgttactccctttttaaacgaagtcacagctagtgactggcagagtagtttggtcaagttacttaacttttgcaaatctcagttccttagctgtacttcatggattaaattctatgacttattaagattgtgtgtgtgtgtgttggggaggggtgttttagtcatcataattaaacacatgggtaattttgaagttaggtttaaattcaagtaggaaaaatgttagaggttgaaagtgaagcacagctactgtctcctcaatatggaaagtttatacccagtttattcaactcttagaagaacaagacacatctgccctgggagagacacatggcaaagttaaatttatttatatactgctttaacctaccagcctaccttcaactgaaccaaaacccctaagatttttccctttgtaaaagtaggtaaacacagacctttacaaacttgaaagtaaaaaatcctgtatgtgtatcagatacaccttgaaattataacctaaatctcaggaatgaacatgcatgagatcatagcaatagcagaatctacttaaaaggagcaaatgattcattctgtgttaccatgatacacacacttggaaaactcatttttcttctatttgtgaaatactctagtcaatttattttgtaatcatcaccacctcaatttcagcagaaaagtcttgcttttacatgcaactgttaaattgtcaagttatctgccttctcaccttataaacctgacttcaaggacactcatctgatgacatgacacttagaaagcatccctatcactaaacacagacaaagtaagtacctcaagtattctcacatagtggtcctgtcacaaaggccattggccccagaatagttttcaacagatttacaaaagatagccaatcaacaaaggacagattggacatttttgaaggtttcccatgtggcatgtatggtgctaaatacttcacaggtggcaaagtcactcaacaccaactctctctccctccccaccatgaggcattcagcatagtgcagaaggcagacacagggacaatggttggagagaactgattcaaacttggtctctgttaattactatctccagctatgggtacttgggcaaggtacttttttcccctaaaataagaatagtcacttcccatcagaaaagagttatgagaattaaatgctctagcatgaaaagtatttgatgagtgcctggtacatagtaagcacttaaaatatgttatttaataataatacaccaaatgcaaagctagctgcctcttctgtcaggacccaaggatgttatccagccatgcgagttagaggagcatctcctcctttctacgcctttccatcagcatccctctgcctccctcaggaacacatggccagacatccagagccttcagggacaaggcatgacacttcccagaacagggacctcctctgagccctcttctcaagccacatgctctgtacacaggagagtatccacatggttctgaacatgctgcttccagattcccaccccgatctgcccacccacatcggctctgggcccccaagctcctggcctcagaagcacaggtctcaggactacagaaaaagaccaaatagagaatcttcttttgtggttattgttgtcttgctttgttttcaaggaaatatcaaagccttgacagttcaggctaaaaagtttacactaagtgttcatactggttagcagacagtattgacaaatgtttaaggacaggtgtctcctgagggccatcaggtgaagtgagatttatatataactaggaggtagacagtaaaatacagtgtgtgtgtgtgtggggggggggagatgaataacttatggaagaccaaataaagctatcaattatgaaaattctcttttccaggtaacctcttgggcaatgtctcatgtggttctctcaagtggttactggccacacagatgggctggaaaagaaggacaacttaattcctagctgcagtaataacctcttattcttggggtactgagaaaagaaaccacagctctgaccaggaacctaagcatttggtaacagccatcagcaaatccagctggatggccagtcaaaacatccatcaagaataatagcttctctggccgggcgcggtggctcacgcctgtaatcccagcactttgggaggccgaggcgggcggatcacgaggtcaggagatcgagaccatcctggctaacacggtgaaaccccgtctctactaaaaatacaaaaaattagccgggcgtagtggcgggcgcctgtagtcccagctactcgggaggctgaggcaggagaatggcgtgaacccgggaggcggagcttgcagtgagccgagatcgcgccactgcactccagcctgggcgacagagcgagactccgtctcaaaaaaaaaaaaaaaaaaaaaaaaaaaaaaagaataatagcttctcccagagggtttcacctggctccgggtggcagggggacaggagatcatctcagcctgttcacaatccatgaccagggagaagaaaggatggtataaaatgaatttgctgtggtgtttggctttcacgtttttgaaggtggctaagtaacatctcatgacttgtgtggtagtgtggctgggcagtctaagtgccatcttgtggaggaagccacatgtaaaggcagaataaacacaggctaggaagaggtccttctgtacccccacaaccttagatcttctggctcccaggctctgtctgtggctaagagcagtgaccaacgaggtgttgcaaactggggtctcaagggccacattcagcccacaatcagattgatattttaaaatttttgtccacaaagtgttcattaaaaggtaaattagttgccaatattttaaaattgggatatttacattaaaatcttaattttccaatttcttttgaaaattaatacatccagctacacacatcacactcttgaatgactataatcagctggacctgaggagaggctgactcccgcgagataggacatgtccttgctagtttaccccagatcttactctgtccacttttgtcattgaagtgaccagcctggcctcatgggcatttgaatctgtaaccttgcaattagatctctgtgactttatgagtaaatccaaaaaaaaaaaaaaagtcaagatggcaaggagatggtttctactctcaaggaccctatagtcatttatgttagttttagtccttctgggtttctgacacaaaataccactcattgttgtaatcccagcactttgggaggccaaagcaggaggatcatttgaggccaggagtttgagaccagcctggtcaacatggtgtgatcctgtttctacaaaaaaaaaaaaaaaacacccagtgtggtggcacgtgcctatagtcccaggtacttgagaggctgaggtgaaaggactgcttgagcctaggagaagttggatgctgcagtgagctatgattgtgccaccatactctagtctggatgatagaataagaccgtgcctctctagagagacagagagagagagagagagagagagagagagagagcgagagaaataaaaaacaaaaacacacacaacataaactgggtggcttgtaaatttctcacagttttgaaggctgagaaatccaagttcaagatatcagcaagtttttgtgtccagtgagggccccctttctggttcatagatgattgtgttctcactgtgacctcacatggcagaagagacaaagcagctctctggggcctcttttctaaaagcactaatcccattcatgagggctccatcctcatgacctgaacaatttcaaaaggctccacctccaaaaaccatcacactggcggtgaggatttcaacatatgcattgggaggggagggatgcacacatttagtccattggcccttctcacaaaaactacaatttgcttgaattaatgccatactcaaggcctatgtcgcaagggatctgagaatacagaggaggcaagtcaacaaaagaagagtcaggggaagtatcacagatgaagaggcatctgagctcagtgttatggaatgaaggaaatcaacactcagagaaaaggtaagaaaaggctctcccagcagaggaacagcctgtgaaaactgaagatgttgtgaagtttataaagaggtgtagggtgtgacctaagtattggcttggtgagggagctacatcagaactagaccacgaaattttataggagctttattctattcagcctataaccaatggaagaaatctaagactgtttaaactagggactgatatgatcacagttactttagaaaaataacacttgtggcttagtagaaaatgggttctagaggacaaatgacaaaggaagaactcaggcagggtctcttacaatagtcctagtgacaaagaggttgtgaaccgaacaatggctctcggtggaagggaagagagtaggcgaatgaaccgagaagtcccatgaaacctgttggacatgggttatggagaagagagaaaagaggatgaatcccatgtttccaaaatggcagaatgaggagaatgaggtgccactgataatgaagggaggtgagaaggtgaaacaagtcttggtggtggggagttctgaggggtgagataatgcaattggttttaggtcaatgaaaagagagtacaaggtaccagaaatttcaaagtcagtagctgccaagttcaacttaaacagtggctggcaaactattgcccatgggccaaagctggacactgcttgtttttacacagcctgcaagttaagaatgatttttatattttaagtagctggggggaaaaaagaatatttcatgtcaacattatgtaaaattcaaatttcagttttgctggaacacagccacattcgttcatttacatattgtctcttgtggttttcatactataatggcagagttattagtagttgcaacagggactatctggctcacaaagccaaaattacttactatttgggtctttacagaaaacgtgtactgacccctgaacttattaggttgaattatctgaaattgtttttgcagatcaaaaacagttgaatactgacgatttcacatagttacacgtaatacataggtgaagcaaaagagagatacaggtttgggtagaacttaacatgcagtttggcattagtagtaacattagctgtggatacactttgctttaccatttggaggccatcactaacttctatccccttcaccaatataattaaataactgagaatgaaaaaacaaacaataaagatcaaaagaagatataatgttgcctcatagatttccccccataaatatcagcgttttcttcttcatattggttgtttagaaatgaacatttaacatagtaaaaatgaaaatcagaaagtcatctttgtgtatttcctttcaataatcctctgggtccccttggcaaaaccattaataccaccaatgtccaacttccttatttaaataaggaagtctgtgctctgtcagatgctggaacaattcccgtagaaggccccagtgctgctctgttggagccaactgaaatcaaaataaacgccaatccaaataagattgaagtgttgaagttttgcataaaataaagcagaaaaaatgctttttgcaggtttagaacaatatcatttgtatatagctatttgcatctgttggtgattaagggaaaaaaagcaaagttctgcttttctaaagatcagattttgttttatttaccagctgtatcagtactatcggcaatgtgagaaatttttttaaacaaaaaatttttttgaaagtcagtttcaaatgtgtaatttaaacaaaattttttttgaaagtcagtttcaaatgtgtaatttaaaaacccaaactttaaaaagcctgaaactaataaaatatgaaaccaaaagacagaagtattctaatctcaacagacttcagataaaacatatacatttttaattgacaggtcctcaaaaatcccagacaccacctaggctttctccttgttgctggataaagaaaatattggactatctaggcctctggtatttttctttaaaccttaaagtaacacaagaggaataaagttatacagaaggggactgttatgtagtaaggagggttttaagccctaacttgggagttatctttaaagaggtgctatccaccttcacataggaggccactccacctaaacatacagcaaagcaggaaacatgggaggggcaggtagacaggttttttctctgctagaaattggagacgcagtctcatacagcttttaagagcagagagactctggaaccagactccctaggtttgaatcctggatccgcaagtaggtaactgcactacttttggcaagttatttccctgtgcctcagtttctcataagatggggataatgaacagtatttttctcatatggtagctgtctgactgttgtaaaaaaagaaatgttaaaagtgtttcataggctgggcatggtggctcacgcttgtaattccagcactttgggaggctgaggccggcggattgcttgaggtcaggagtttgagaccagtctgaccaacatggtgaaaccctgtctctactaaaaatacaaaaattaaccaggcatggtggtgcgtgcgtatagtcccagctacttgggaggctgaggcacgagaattgcttggaaccccggaggtggaggatgcagtgagccgagatggcgccactgcactccagcctaggcaacagagggagaatctgtctcaaaaaaacaaacaaacaaacaaacaaaaaaccacaagtgttttatacttaacaacttaatgctttcaactgtaaacgtgagaaaggtgttgttattatcctcattttattggccaaatcaatgtcatatgcatgatgacttatttaggtaaatgtcctaggtgagccattctgatatcttcttatagcaactgaggttttacattatgtattgtgctcacacatatgataatcttgcaattagttgcacaacagactataaataaaacacaggtaacacaagaaggaattgtgacacttcacatggtttcagtacttcaatatattttttccaaggcaagcacagtattactgcaaatgtacattaaaagtgataattaattttccccttactacttcagtcttttttaaaaagtactttttaaaaaaagtactttattttaactgaaaacaatctgctttgaaaaatctttaccctagtgttaattaacctgcagagaaagtgtgtttccagattaaagactgaacaatacatcaagtagccctttgaaaactagctgttatctgatcaaatatttttacctttgtccccagacccagggcaaagctcagttagcaatccaagtctccctaatttacaagggaaagaacatgctaatttagcccttgaggtctcagaataacccatctgagtttcattttaggcaaactgatttctctaccctaaggaagctagaaagtacaataagactttgcctttgtcaaccttaaataacgagattcagaaattatgattaagcatcgagtttattccagcgcagtgcaaagcttaagaacagccacctgggcagcacacactccaaatggatggggttggtgttccaaagtggggaagctaaggtttcacttatataggcagaaacagttttagcagggttcagcactttctgtacaaagccagtatgtaacattacagtgatttgcttagtatggattactacattccaaggaagattgctttagcattcctgaggagaaataatgttctgaggggcaaggggggcgtcttatctctgatgctgcttcttcattgctaatcatttataggaaaaagcagaaatagcaactgcatgctacatgattcaggctacgtagccacattcccctcaaggctcaagataacttaaagttccaacagctttaagtttggattatttaatttcacactttgaaggagacaaatgcgctgaatgtaagcgattttaaattagatgcttaataccatccttaaataaaaaggacaaggtggactaccaatatatttcaattagtcaagggtagatgtgttccaaaatgttgtgtgtttatttcagttgtgttctccctatctcaaatcacatagcacggagtaggtactcgataaatgttaattgaatgaataaacaaatgaactcattttgccataacaccccatgggagagagactagaataatgacggtgttctaagcctgcctatatatttcttaaagcttacaatatttggagtttctcctcatttgatttctgcattccatagaaaaaaattaattataagcacttctactaggaaatgagcttgggagtaggatatgttaaagtgacccctaaacattctccagcaaagaagtagctgatagatgtcagagcctagggtacctcttcatccaaattccacctctggcttctgccttataaataagttctcaccctattaacagttagagccgaccaagaaggccctggagggccaggatggctcttttacaacatcaaaagactactgcaaaggagggaaattccaaaggtctaaacaggacctggaagtagcagaaagataattctgacactatcggtttgaagctacccagccatgcaatgagttacctcaaaaagtagaattcccttcactggaaatgtccaaaagctggcttatgacctcccagggatactctgaggatctctgcatggaatgggaagttcctaaggcttcttttctaactgttgagcctatacctccatcctcttcttgcctccatctgtagttaatacaaaatctatacttctttcagagctaaaatttacatggaacatagttttagaaaaggggagtggtacttcttgctgaggcaattctctgacacctggtagaccatatatgaggtatggaaagtcttgtaaaaatggaaatttcattgacttgacttcctatccccaactagacctttaatacgggtgtacaagggaacctcaagtgctgctgttccttggggctgcaaatgtggcttgctgttcttcctccccagacaactttccctgggagatcgtctctattcccaaggcttcatttaagatccaaacactaagcactgccaaaatcatatctacagtacagatctctgggggtgcctggcctgtgtttccaaatacctgtagaatatctgcctttgcatgttgcacaacatgcaagctgcccaaccctatattcatttctccttccttctgctgtctccttcctgtctcaaatacaatcctccttctggtgttctttgtcttagtggacaaagaattccaaggagcatccttgtcctcccagcttactactctccccacatctagcttctcagcctgcggggctaagtcataactatgacttacatccccatttccatgccttgtccaggcccttgtcacatccagcaggcaccaatatttaaacctcctaacctgtcgtctcttcttagtaaatcctgcacagcaggcccggactgacctttctcaaccgtgaatgtggccatgtctctcccatgctcaaatatctccaaatgggctctgaagatttcaggataaaatttaaacttttgggccaggtgcggtggctcacgcctgtaatcccagcactttgggaggccaaggcaggcggatcatctgaggtaaggagttcgagaccagcctagccaacatggcaaaaccatcggtactaaaaaaaatacaaaaattagctgggcatggtggcaggcacctgtagtcccagctactaaggaggctgagacaggagaatctcttgaacccaggaggcggaggttgcagtgagccgagattgcgccactgcactccagcctgggcaacagagcgagattccgcctcaaaaaaaaaaaaattttttttttttttaactttttagcttaccatatcagtgtcttcctgacgggccctctgaatatcctcagcttcccccatctggtctcctcgcaccccctcatccttagccataataaacagtttgtggtttacaaaaagcacccagttgctacataccacgattccttctcacatgccttttccaccccctgcaatgacctaacctcctcttgtctgacaaacatcccttgtccttcagtattcagtttgttaaggctattttgcatgcactttattgttcttaaagactgcagtgtaaccagtaagtagcacagtgctcatagtatggaaatcaccagaaacttggattggtatcctagctctgccactggctagttgtgtgtcttggggaggttaatgggctactgtgtggactaagagaatgcataaatgtaaagtgcatatacctgtcagagatgtttttatctgcccagactccctttctcctagacatcatctttccttcccaccctcctccgtcccattcatatggtttttccatggccagaggtgactggtttagggatggccacctgatctctgagctgagccaattagggcccttctgtgaaaaatgaaagaaagaaaaaggcagcagaaggcaagaaggggaagagagggagagacaaagaggagaagagtacatatttgtgagaagagtacatgttggaaatagaatctcaacagagtccctagttctaggtgttcccaagacccatttgtctttggaatatctgggtaaccccaatattctctaataaatttcccttgaatggctgtcaattgcaagctagagtatagcaagacccaactctcaatacaccctcactatactatcattattaaactgcaagggccgtgaaggtaggggtagaaacttatttaattctgtattctcagagattagcatagtgcctgatatactgcaggcagtcaagtacctactaaatgaaaggtttgttgacttcaggggagaaattataattcagggttaaaatttatatcacaagctcaaggatctctacctaacatcctgtgctaagaggtaaaagacaacaagaagtagcaaatttttgccagttatgaccagagcaagccagtgaggtaaacatctgacagccactgatcaggcatatttaatcttctgaatatctttgatttattatcaattgagtaaatcaaagtttattttaaggattcaaaaaaaaagctgttaaacttacatagataactattactgaagcttaccaagagtagacagtaagctgttcagaaatctagcaactgaaaaaaaaacaaatcatcactcccatggcctgggatgcggaaggactcagaaattgttggaaattccacagactcaaaatgaggtaactgtttaccttccttattgcattttaatctagagattaaaatagatctcattgttccagaatcctgcctatggtaagaaatgagttctcaatggctgagaataaattttaatagcggaaccagaagcataagagaggaaatcatgaggaaaaatttttcttcataaaaaggaccatgaggttaattttcatttcattacatttctaaattgcatatatttttgtatgctggttgcaaaatatcctttctgtattgacatgaagtataaattaatcagtaaatacataaaattcttacatcctacattttcaaaatagctcctaactcattaatttattccaaaaataactaaggtgcaaaagttcattaataagatgactgataaacttgatatatgaattaaccaaaaccaacaccaaatcaccgttagattcaggcttacctgaaaattttattaaaccacaacttaataaaacacaatactaaatgactacaaatgcaatctaggacactttccatggcaagctatatttagaattccaagctctgttgggtagaatggttctcagattttcatgtgcctatgagtcatctggaggacttcttaaaacattgattttagggccccactctcagagattcaaactcagtagatctaaggtaggatctgagcaaagctcccaagtggtggtgacactttgggtttactgatgatgactgagttgcactggcctggatgaatcatggtcgttttaatttcaccaagcactggaattcccctgcaacctcagcctcattccactgagctagagaattgtacgtgatatacccttagtttataatccactggtggtggctggtactaccagagtcagaagctcaagagactcctagagatggaaaggggatcctagtgaggcattgaattatggtaataggaacataaacctggtggggttgggggggcagtcactgggagtgggacaagggggactggggactaggataatggggactcccaaaaaagttgggaacaaaaatactggcaggtcattagctgcaggggaagggagtgggaatagtggtgagtgagagactacctcacatggaattcctgttaggaaatggttgggaatagaaaagaaatggtaacagagggtgggagagggcaggggacacacaggaagcttgtttcccaaggcggaagtggctgccatacaaaggggtacagggcatctggattgctcagcacatccaacctgaaaggtgaataaccatctgggacaactctttttatatcaaagataatgatacactatctaaattatcaattacaacacacttttactagaaagaaaaaggactgaaataacacttgtaaatacttgtgatttaattgcatattgtctcagttgagcctcccaacaacaagatagatagggaaggtattatctgtcccattctataaaaactgaatccagaaagctgattgacctggggtcagatagccattgggtggtaatatcagactgatatcccacctgattccaaagcctattcacccactaccctatgcagcagagaaaggaagctgagcagctctcagatctagaaggaaaaccaagggtccactagtatcatacaagccaagtgtgaggttttaagagggaaaggtgccaggtgctaagaaaagttcaagtgcccactagatatggcaaagaggttatcagtggccactggtaaggactataaaattcaaagtactaaaatactctcccctcccagaggaagaaaagttttaagatgataaaatgcactaagtctgagatggaatgcattcgtttccagggaagtatttcacttgtctgcttcctttttatgaataagttaaaaacttgaaagagcatccatgcctctacacaaattttagctctaatccaaaggtgacactgttaaacaactgctctaaaatgctgtcacaactttctagaaattataaatagcaatttacagagtaattaaataacaattttttacttttttatttttttgagacagggtctcagtctgccacccaggctggagtgcagtggtgtgtgatcatggctcactgcagcctaaacctcccaggctcaagcaatcctcctccctcagcctccaagcagctggaactactgacgtgagccaccatgcctggctaattttttttctatactttttgtagatacagggtttcaccatgttgttcaggctggtctcaaactcctgggctcaagcaatcaacctgccttggcctcccaaagtgctgggactacaggtgtgagccactgtgcctgggcaacaatttttttaagttagcttcaaattccatggacatttcaaaacttaatatatatgtttttgtagttaaagatttactgataatttagttttaaactttcaaattattttttaaaaataattttgactcctgaaaattaaataaaaatttttgaaagcacacccaataattaaaaacttaactgcatagcaaattggtaatctaacaatacaaattagtaatcaaaaaatgcaagtgacttttaaacaactataggacaaaaatctaaagaggaaaactgtaaaaagcaaaaaaatcccaaaatgtccttggcagttttactgttagaaatattggtattgacatgttgaaactatgtatatatggatatataaagatatattttaaaatatatattatataaaatatatattctagtaacatataggtaaaatatatatatatttatatttttttcttttttcttttttaggggaaagcatgaatgcagtcccccactaccacaaatcatgcagtcgagtttcgcacttttggggaaatcacaggggtcagcacacccagagtgcaatggataaacctcgccctgggaaaaccaccttcgtgatcatgttatctcccctgccaggtaagaatgggatatagaataaatgttatttattaacagccataattgttaatgtaaggcaataaatataaattaaattgaagaaaaaccttgtaatgttaaatttgaattggagatatcaatatgaagtcaactgttgaaatacatgtattttttaatgctgtctactcaaagggcctggaaacaaggacatcctaggactgtgagcattctaaacacccagactttggtttccaaatactactccccactgaaagaaaccagcgtttcttggcaaaatggtgattccagatacgagacagtaaaagtgtaaggtgaggcagaggcagcttgtagggccagaaagcataaaagcactcaaagataatagggcatttcagaaggacacaggagtatgtttgaaggggctatcactggttaattctgagtcaattaacatcaaaaacaaacaaatattaacacagagaaaaaagaaatccctaaatctacagtgctagttaaaaggaaaaataaaactaaattgctagggctgggcgcagtggctcacgcctgtaatcccaacactttcagaggccaaggtgggtggatcacctgaggtcaggagttcaagacaagcctggccaacatggtgaaatcctgtctctatcaaaaatacaaaaattagccaggcatggtggcaggcacctgtaatcccagctacttgggaggctgaggcaggagaatcacttgaacccggggggtgaaggttgccatgagccgagatcgtgccattgccctccagcctgggcaacaagtgtgaaactccatctcaaacaaacaaacaaacaaacaaaaaactaaattgttacaactgaaggtgactattatactagttacttattctgaaaattgataattaaaggagagaaattaaacactgacctatcttgctgagaaaaaaactagttttttcccagttaataaagtactatggactgaatgtttgtgtctctgccaaaattcatatgttgaaatcctaacccctaataggatgctgttaagagatggggcttttggatggccgggcgcggtggctcacgcctgtaatcccagcactttgggaggctgaggtgggtggatgaggtcaggggttcgagaccagcctgaccaatatggtgaaaccctgtctctactaaaaatacaaaaattagctgggcgtggtggcgggcgcctgtaatcccagctattcaggaggctgaggcaggagaattgcttgaacctgggaggcagaggttgcagtgaggcgagattgtgccaccacactccagcctgggtgacagagcgagactctgtctcaaaaaaaaaaaaaaaaaaaaaaagagatggggcttttgggaggtaattgggtcatgaaggtggagccctggtgaatgggattggtgcctttataagagaaacccctgggagctctctggctttctttcctacatgtgaggctacaagaaggtggcagtctataaccaggaagagggccctcactggaacctgaccatgctggcaccctgatctgacttccagcctccggaactgtgaaaagtaaatttgttgtttatgtaccactcagtctgcgatactttgttacagcagcccagactaagaaataataaagaaatgttattttttacagaaaaatgccatcatgtagaggaattgataattggaaaataatcattctgcaatctgcaatgacataattggtttgggcaaagatcatccacagatgctaaatctcttagatgaaagattattgtcaaaagagtggttacgtggtgccacctcacagatttcttgctaatttcatggagataaacatacctttacaagggaaagatatggtggtgaaaccaagtgatcaaacatgggtcctgtgagtgggatgacccggcactgcatgagtgggatacatctcctgatgtgacgcaacttgaaatgcacagcatcagctagaaagtattcttcccaatctaactaagcctttaagcataaatcccagtgtacgggaaacaaaggagatagagaattgggctaaacatcacaaggaaacaactagaaaaaactaaaacattatgatagtctgtagaaaactagtttggtttcttcaaaaggtcaaccttataataaaaaggccataaaaagacatttctgggatgggggcggtggaaatgcaaatatggaccatatgtcatgaatcaatgagaagtttctcgggggcaataatggtttgtgcttctgcaggagaaatgtgcttgttcttaggtgattcagactgaaatatttaagggttagataatttaaaaggattcaaaggaaaaaatgtatttagggagataaagcaaactagcgaaatgttaataacatgaatctaggtgaaagatattcaggtacacgttaaattattctttcaacacttctacatgtttgaaatgtttaataaaaggttgagagaagaatctacatcttgctttaatcctatgaggaaatgaaagtttttacagatgcataaaataaaatgtgaaaacatatgtaaaattcaaaattatagaaaaaggaataaaagaaaatatcaagaatgggaggagtttcaatgcacatatactaaccacagttcagatacttattaaaaattaagactcaaatgtagttctcggtttcctggctgccacgcagaactgtggccactgtcgcaactttccgtcatccaaaggccaacactgctagttctgtagggaaactagagctggttcagaggaaatgcttcttcccatgggtttcctatgggaaaaactcattgataaagggaacaacatcctcatcatcacccccacaatatatgcaaggggaagggagcctactcctttctattgtctgtcttgctatagaagataaggaagttctattgtctatctctctacagaaggtaagggggtagttccaaagtcaagtgcactgaaagccctattgggaagagaggtaggtagggatgaagaataaagacaaaattcacagagtactacagagatggccaagctgcacgtcattcaaattaacttccatacatgccatctgctccaaaaaagtcttctgataaaaagctgggcagcagaccaaaaaacaaaacaaagcaaaacaaaacaaaacatgaaaaaaacaacaaaaaccgtcattttctgtttgttgctcacatacggaaacaagattgatttctgtattgttgaaaagagatcagctttttctttaaagctgagcagcacatttactgttgaactctgacaagtataaacagtgtagaaattacttctggaaaaactagatcactcaggcaactcttaaccgcaatggatggccaccccacctgcacatagccagagtttttcttaaaagttactctggtctgctgcaactcaggaatgatctacagtctagaaaatcttaacatttaatgctgaaaagtaacgcatctgacactttgatcactctccacaagctttacccttttgccttatgtgcacactacttctaattatttggggtagtcacaggggtgggggtgggcaggagtgaccttggcaagttactgatagctcagtttctccacctaaaaatgaggataatttagtatttaacctctcagggttatgaagatcaaatgagttttataacaacctgtgaaagcctggcatactgtagggcctcaaaaatgttacagcacacttattttttaggtagattcatcgtaagtaatcgccatgaaatcacgagtatcacatcaaagctttacttttatttaacagacattgagagaatatgcctcttaaatcattttgtagccatcagaaataggtaaatgtttgtcactctcttctggaaggcagaatgacacaaaagcaatattaaaaaaaaacataaaaataaaaaatttagaagtatgtttgttttgggaaagaagagggagaatagaccaaaattttcttctagtggtcaagagatacttcctatgaccctgaccctcacccacagtataggcttagtataagcttcagggattagacatctggtaactaatatagtttcctctaaaccagccactttccagagtcaaacacaggagagtcagcaaaagccactgtgttagaatgctcttgaaaaatttccccatgtgataaagaatgtactgatcccagtaatagtagaataataggccaaatgtagggtgaccagctatcccagtttgcctggcactattctggttttagtgctgaaagttttcccaccctctcgcttcctggcaaaccatgatgttggtaaccctccttaaagctaatttgctcttcatgtaaaacactgctccaagcgacacagactggagactttttaagttggaaactgacatagatatcagacagtacgtccaacaaactactaagtctaaagttgaggaaggcagaaaggggcaaactatacttcagacacacgcagaacccagagaggattatctctgaggcaatgagcagaaacaggttgtcatggaatgaagcccaagagtcacaacagattttgaacactgcggtgccaaaagcgctaaggtttcaattagcagcgagaaaagatgacttcttaggacccaacatcattgggttaatgtgttacatttggggctgattccttggatccctgggatttcaagttgtatgaatccaatcttccggtaatcagtagaaagttcaagactttttcatctaaagcacccatgttattccaggtctctgggcctgtgaatgaactgtcaagtgaagagtcaacaactgagtccaattttcatgcttctttgcatgtctggcaatttttaattagattcctgacactgattttgagcttattgggtactggatatttttgtatatccataaatattcttgagctgtgttctcaaacaaagggacatagttactttgaaagagtttgatcctttcaggttttccctttaagatgtgttatgtgggatgagactgtgttaagtgtacagctaattatccactactatttaaggcaagacccttccaaatgcactgtgaatgaggttttcccatttggttgatggaagaggcactattcttggctctgtgcaagcactgggtactgttccctctaatgcatttggatggcttcttctccagctggtttcctcatgtgaatgtgctgatcagaaccttggtgaatacttgaggtagactctctgcagatctccagaactctccctctgtacaactatgtcttctccaggacactgttctgtgaaatctagctttcttggtctcctcagactctcaactcctcttcaactcagagggtttgcttggttctgcctgggtgggggcctctctaatgagcataagttaaagagggggcaatctctcaaagtggggacaatcacagggctcaccccatttccttcccatctttcagagatcactatcttttgttgcctgatgcccagtgtcccacaaaccattgtttcatgtatttgttgtctcttttttttattttgtcagatgagatggtacatccaatgtattactgttacttcatcttggttagatgcagaaatatcccaggctcattttcaagctagatgaaggatattgaatgtgcccaatacaacaaaatgataaatgtttgagatgatatggtaattgccctgatctgatcactatatgtattgcaacatcattatgtatcccataaatatgtacaactatgtgtcaattttaaaaattaaaaattaaaagagggaatctttgtcaacgttttaaaaatgaactgatgccaaacaggatctgacactgtatctagtactgcactgaaaattttactttagagagtgaagcagtatttataacaatggatgggatcttgtggctttttgggtgatcacaagagcaggaaagatccctacggcttcacagggtaccagacacttggcattttgtcacaataatctatttcacctcctagctatgctaggatattaatttacctaagaattgtcttttcttaaattgggtaatacataggtctaatgtgtatatgtgatcattatagtagtttatgaatcagactcaaaggtgtgaaaggatcttctggaatcatataattccctactgtcttcaccttcagtgaagaccagatttcagtgtgtgcgtgtggtggagaaaggagggatgtaacttatttaccacaacatccctagcacccagcaaagggctggcacaaagacagcactcaaatattttaacaaacaaacaaataaaggaaggaaggaaggaaagattactactgttttggccagttaaatatgtaacatgaactcaaactccattcagtggttccaaggcatcttgagtgaaacatatataacctcctttgtcctcctggtttggttagaagcaaagggaagaatggtggttgtgatcaatgagaacacagataactgggttttgtagttgttacccaactaatcctagttttttaaaaaatttattgtatttattcacataataggtaagattataaatcactccaaagacataacatctgcttataaaacagcctcacatgctctttataagtccaaattgaaagttctcttttagtcttcatgatgatgcctcaggaacagattcagctgttttgggtctgggttcaagtccactgaatgtcaagtttttaaattttatttaagcccttcatgctgaagctcaaattcatgttatcacattgctgtcactgaaggtcctactcaaccttcacctctccaaattagaccacccttgcttgctctttatactagcccctcataactctgaactttatattaaacatttattatattgtgcacattatattttattgtactcatttgaaggcacagttagttttctttgtgagggtttcatgagggcagtcatgcacccaggtcagcgccttgcatatatttttatatgataattacttaatgtatatacccttatctatttgtcatgaggcttcagactttttatggctcccctttgacccatctttcaaaaataagtcctagtctacatttgcaatggatccccaaatggaccattaccaccaccaccaccaccccatcaccccaccacgccccctaccactccccagataatctctccattgctttcacttccatttgattttacatctctttcagtagctgccacagagagccttgtattataattacataatcaggtatctttctaccctattaaattgacaagaatccagagtcagaactcagtagtattcatctttgtgctgcctgcaggatgtggcccagagattggggtacaaataattatattatgctattattgattacaggcaccaattgagattggctaagcctttccctagggtttctagccagtttaataagctaatttaggctcatttttcagccctgccaagtgtaactgcaaagaggaaatgctttttttgttgttgttgttgtttttttcataaataactctacaggtttcctaaaagtttgcttttcagaaaccacttgcaagcatgcaatctgtctcccctactgtccacacctccacagggcagaaattgtgagtaaactgccattcctatagtgtcccggcaggtctgcctaagctttcaaaactgtcctcaaacttttttagtcaaattttacactgtgtctaatactcagttgacaggaaaactgaaatgctggtcatcaaaatcttcttaaggctttaagcaaataaggagatatgggtaaacatgactattattcaatgtcagttttattcctcagctataacacctttataatttaactgctttggtacaatacaggagctttaaatacctctcactctctgccagatgaggaagatgaacagtcatgggggacaaaatgttttaattcatagaatttcaagagaatacaacctaaaacccattttaaagatttcttcctttattctaattgtcacacattaatttctcattatttgcttcatactatgtacaaacacaaatgagctaaaaaatccgtaaagtcagaagctaacttggtagcaacaggctgacaattaccataatggatacatatgaattctataaccatatacattgatccagcttcagtaacagcagcaaatgctatccctggaagaaacaggggaggggtagcttaaggtggctgtattaggaaacaagccactaggaagcatgcgatcttcaattctagttcctcattaacattcatccaaaaaacaagggggaaatagtgtgtaaaaagcaaggtcagatctcaaaacaggtggatgttacattttcacatctagctctggaatcagtaatttgttcatttttgtgccttttccggctccacaggtaaagcaagatgcccaaatgtctgttttcaaaatgaaccctgcagtgacttgcattttaaacagcatggtgcattatctttaataatagcactggccacattttggaggaagttaactgtctcagcaaatgacagaaaatgatcctttcacatctgcagctagtaatctaagctctgaatagtgattcattcacatcagtcagtcaaataatggcctaattcctcttccaaatttatactgcttattgtcttatggaacaatcacatatgcaaagccttcaaggctttgcattcaaaaatgtcaagttaggaaatagatcacctgaatgagaagaaacaaagctatcatctgacaccagtgcttgccaccaggcccttcacatcccaagggacaaagcccctgccttgaaaaaacctaaggagagggcacatccattgttgctgtgggggccaccttctgcctagaatttcctcagtaggcttctctttcacttcttaagagacattcaagagttagaagcacagaattaaaaaggaatacagcatgcgctaacagagaacattataaacccaagaggctgaaagagaaagtaggcatgtgtgcttgtcttctggggaggtgaagacgtgaggataatctgttctcatgctgctatgaagaaatatccgagactgggtaatttatttaaaaaacaggtttaattgactcacagttccacatggctggggaggcctcaggaagcctacaatcgagtcagaaggagaagcaaatacatccttcttcacatggtggtgggaaggaggagtgcaaagcaaaggggggaaagtcccttataaaaccattaccattagatctcgtgagaactcactatcatgcagacagcatgggggtaaccacccccacgattcaattaccctaccgggtccctctcatgacacatggggattataggaactacaattcaagatgagatttgggtggggacacagccaaaccatattacaggggatgttgaaaagaatcaacaatcaaaaccttgaaagtatacctttcaagcctaaagatcttaatatatatccatttaaaaaatcaagaaacaaaacaggcacaaagctctatgtcatctaaactgataattatgggaaaagcagaagtcagactttgaaaatgatttatataaactgtttcatctttcagatgaagaaaatgaactgtagaaaattctccaagttgtccaaggtcatatggtgataaccctgattatgacgtactgaatccctgacgcatctcctacaactcagtgttgaaaggctcagcatgccttggtgctcctccttccaagcgtaaagattaaatttacaacatcactataacctctgccttctaaagaatcatattccaatatcccctgctccgatttacagcagtttgaattgttgctattaagtttcctcgccacagaaacaatggggttgttggatgaacatggcttaacactgactgggtgtgggaaaatgaaactgcactgtctcttatttcgtgttttatcatttacccagcacttccagatgcatcatcttccttaacactcaacactcctatgtggcaggaagagcaggcattacacctcccttcttctagataagaaaactgagtctcagacctgcctaatggcaacaaaatgtaatacgagtaagacgatattggaaactaagacaggcagtgagatttattgagattagcatcagcttaaaaattgaactagactaggttaaaatcccacttgcttctttactagcaaaataagctatgggcctcatttctctcctctgaatcggagctaccataaccaccttccttccaggcatttttgaggattagacagagattctgcaaaatgcctggcacagcagcagtctctcagcaaatgccggctagcattaggaagcactaaaattaaacattccaacaaatcacaagtttcaagtcctggaaacagtaagtagttaatactaacagtttcatttaaactacagaatcttcagacatggagctgacaacagatgattagcttcagttgacatttatagccatccccttttctatttgtttaaatatttctggctctattgactttctatgactttttgcaggttgctttctcctcgtcagacacattgcacactttgtatattcaaatacatgtcttattctccattttactcccagtaatagatcgtttaattccagaacagaagccatatggttatagagaaagaggcaggtgaggaaacgaaccctcaccgctaagacttcctggaaggaatcagtaagtctcattcccttaagcagggcatagacccaaacatttcctgggccagaatgctgtatctagggcaccgtggtgcttgcagcaagctggagagcatgtgtcccttctaaaggggcagcttgtacacagctccagctgcctgggaatatggctcagtgttaccaagtctccaggcatttcaaggaaagccaagaatctgtattatgaaaaatttctagatttttgaaaatacaatgtgggccaaacaaaataatgcttatgtgcaaatctggcccaaaccaaataatgcttatgtgcaaataatgcttatgcgcaaatctggtcaccaacatttcctgtgttaccctaaagccttctgagatctaatacaccaaattgcagagaaactctgccctagagttttctacctggaaaattgtgcagagagcaaagatcatgacagacccagagagcgggctgctgacctaaaaaggatgaaatcttaaacagaatccactggaaagtaggaagatggagaagtcgggggttaggatataagatggctactggccccaggagaggcaagagttctaatggtcagaagatgacagtgagagtgattagctggaaaacaaggcctttgagagaggtttttgcatgaaaaaacagatataagggcttttcactacatataaggctgtgacctaaataaacttgaatgtctgcgagaggcaaactgacttgagtacttctgagcatctatcgagtcttcaaggctttcagatgcatgaatgatatatgatccttaggcctctttcaaagactttgttttgatgacataacccatgcctctttgaatgtcatttctagagggctgaaattgaaaaaacttggaataaaaagaaatgtaaaagaatctttgtgaatttggtgtacagctttaacagatatgtacagacatctatcttctctgatgaaacaaacctagaagtagcaaagagaggcagcactttaatatcatatttagaaatatatgactcatggcataatcaactttaaaaaatgtgctgagaaaatccattagtcagagattccaatcattcttttatatatgaaaggcagagatatagtaaaacaccaatttatcctttatcatctaatttaacagacatcatttcaatcttttaaaaatgctttagtgaaaattcaatacatttttaaatggagatttttgctctccaaggtagaataatatcaaataaccctaagaatcactcaaagttttaaattcacagaaattatattatacagcattgcttccacttacagagctgtttttgtttgtttttgtttttagacagaggctcactccatcacccaggctggagtgcagtggcgtgatctcaattcactgcaacctccacctcctgggcccaagtgatccttccacctcagcctccagcatagctgggaccgcaggtgcgtgccactacacctggctaatttttctgactttttttttttgtagagatgggggtctcaccatgttgccaagactggtctcaaactcctgggctcaagcaatccccctgctctcacctcccaaagtgttgggattacaggcatgagcgactgtgcctggcccagagctgtttaagtaaaaatgattataactttaaccacaccccattattcacaaatgtggactttataggccacatattcctattcagagatactcattcaaaatgcaaaagggtgtctaatactatggctaaattgttgatcacctatattccatttcccacaagtgaattttcaatggactcactttcacacataaggtaatataacaattagtgttccccaaaagaaagcaaatgtgtagaggcaatactgtcattctccataagcctaagtttggaaatttttaaatttgcttgttaagtaagagttaatctgactcttactataggcactatagggttgctattgtcttacaccgtaccatcaaggtgaatgaaaagggagaactgaatttcaggaaaaaagtgggtttaattttaaagctggaaaagggttcagggatattttctcatttgacagacacaggaaacacagtcactaaatatgactaagaccactgcccaatttgtcagcagaattcaggtatcctaatttcattcccaatgctttttccattatcgaggctcttgataaaaactggcaaagcaataaatctaaccatgagacataaggatcttttctagctccattcatccacatcattgttataatctcattttgcacatttatctgctagcaccaacactttaagtttagagcactggttctactgcaggggatatttgacaatgtctgaagacagtttggttgcagcagccaggtaagggtgctacaggcatctagtgggcagagcccagggatgctggcaaacatcctgtaatgtgcaagacagccctcgacaacaaaaattagcccacccaaaatgtcattagtgccaaggctacaaaaggctggtctacaggtaaagtaagaaggtgggcgcttctacaaagcaagtttgcagtaataaagttgggtatggcattactgttgaagcatggtacataacttgtaaggtaagaactaatattggtttaaaaaaatcagaaataggcattatatttaaagaagataacatgaacctagagtgactggccacttagctgacattctcatgccaccagaatttgtgaactgtgcaatgagcacttgctggttttgtctgctatatagaattttagctttgcaggattgcaggatatttagcattgctgtcagtttagaacaaccaagttacttttatgttgcaggaacaaaatatacgtagatatatgaaaacttttttaatattgaaattcatgcaggaaaattagatttggaaatccaaacctctctttaacccttaaccactttatcttcccactgagaacttcttaaatcaaagcagtcattcttaaagctagaattatcacataataatagtggaacagattcacacacacaggtacaatatgagtaaaatgtttttatgagaaacttgctttcaatatgcaactcaagttcccttaagctaagcctacaagaaatggcacaaatttgagtaaactgtttcccctgcatgacctttgaaaatacttttgaagtccaaaaggcctcaatagactattttaggattattactttttaaaggtgaagctttaagatgataatttgagcaatcacaatgagaaatgataaactgccaataatacttaaatgtccactcctcattagggccaaatgaattctctctcggcagagggaaagagcacttggctggctggccaaatcctgtggataattatttttccttttgctcattctctccaattaagagtgaagactatgtctgtcactagggagggattgcaaagaagcccctcctaagaaggtgtcctttcattttatttagtagcctgacaaggatctggtccaagcttttcagaaagacgtcaccagatctcctcagctccccagaataactctctgtccaagcagctggcttccaaccatcccacaaactgccatccagagacacatttattcatgtggttccttccctccaccccatcaccgtcactgtctgtaatatcctcccctcctctgtctctctagtctccacatgcccttcagggttcagctcctagttttgacctccctgctctcaaaccttcccactaggaacttcaccctcacttgaattccaactgtattctctctggatcattttttctggccctttgtcatttttttaaaatctcttctagattattaaaggtctcacttaacctccgtctcccgggctcaagctattctcatgtctcagcctcctgagtagctgggactacaggcatgtgccaccacgtcctgctaattttttttatttctagtagagatggggttttgccatgttgcccaggctggtctcgaaccctgggatcaaatgatccacctgccttggcctcccacagtgctgggattacaggcctgagccaccatgcctggcctaaagggctcacttctaacaggtttctctttctaggtaaagagaatattaaaaagtatatttttcagactccctataagacccagttaaacacccaaattgttcttgaccagtagtaaccacttaatgcataagtagccacagcgactattgggtcccagctcagtttataaattccctaaacttccagctcagcaaaagagctttttctcagcatgcatttatacaagccaacgtctgtggtgaactccaagcattctcttccaagcagtctagttatgtcagatgtgggaggggtgtcattggagtaagaaactgcgaagagggaaagccaagagacttgtgtcaagctgtttttttactctcttcttcctgtgtcccttgatctcagcagggctccccgaccctgtccttttgatgtcttgctatcccactgggaggtaaagagcctgtccagttcctccaggactagggtttggagcactgactttggtacttcctgacatctacacttatcccctctggtggttttaaagcctgttcacaaattccttgacatccatcccttcaaaaagtgaagcctaattccctccctcctaagtgtgggcaagacttaatgacttgcatctagtttataaaatatggtggcaggaagagtgtgtaaacaggtggtaaaagacatcaaggcttcctctttgctcttttggatcattcaccacgaggaagtcagctactatgtcatgagggcacacggcaaagaactgaggtttcctaccaaaaactagcactaactggccaaccacaggagtgagccatttcagataggatcctccagcaccagtcaaatcttcagatgcctatgactccagctaatatcaggatgggaacctcatgagaggctgagccagaaatacccagataagccgctcccagattcctgacccacagaaacagtgtgacataataaatacttgttttaggccactgagactgggataacctgtacagcaatagataactagtacagcactgttcccctttctccattctgtcacttagaattgagtccatgacgctcatccctagggatgagctccttcaaggccagtcttaatcagtatttctctaccctgctcccttccaccccacaccccatgctttccccctcctgcctcaaggtttcacatacagcaggcattccacaaatgtttattcaagaaatacctccagttccagcctttcctgtggctcattcacaacccagaaaaatgtaccaaaaagctgagttgatcctcgaatgcttacagaacttaagacagtgcatggtaatttgtaacctgtctcctgattatgaagagtttattattaatacaggatctggatttggagcattaaatttggctgacactttcatctgtctgtgctaatctaatgctaagtcatagcttcaatgcctttatctccatggtcctcacttcagataatcagtcatttactttatcagtcacttactgcacattagaagtgctgaaaattctattttacaccagagcaatggtccttcaaactttgtatctttaaactttcccctttgattgttttgccctcttacctactttccttctgaattcaccttcctgcctcctcccatagacccatattagtgctaaatataaccgcagggaaacaaaacacgctaggatctcatcatagctgatacaatgactttaaagtagcttcctctcctgaaatacatcttatgagcactatttttttttttttttttttttttttttttttgagacagagtctcactctgtcacccaggctggagtgcagtggcgcgatctcggctcactgcaagctccgcctcccggattcacgccattctcctgcctcagcctcccaaatagctgggactacaggtgcctgccaccacacctggctattttttttttttctgtatttttagtagaaacggggtttcaccgtgttagccaggatggtcttgacttatgagtacatttatccagcaaagaaagcaaatgttcttttggaatttgcttatgatgcccaaaaaccagtgttaggagcaaaatgcattgccttttcatgggcatcacagcagctggtgtaaatgcccatattacgttctggggtgcttccagagggttggttatgtttttcattttgtcactatcgtctcagtgtctcaccatgtctaacaagatgtaataggactgtgggacttcgacaaggttgagagcagtgtaggttaccaaaaggctgccaaatgcatgataactgccctcctcccctggcttgtcctaaacctgcagtgtgctaccaaggattgaaagcagttttcttaataccaagaacagttcaaggccaatcagacttcttagaagccaggtgtatgacaccatggtctgttctgctcaatctacatcccccttaatagcatctggaaattaaggatttgttatagattccctgtaaagaccatgtaacatctgagcctgaacaacgtgtaggtcgcaagctggagcccgcttcctgctagggccatccacaaagccttccctgcctcggcgactcaggcagaattgtctctgctctggcagtgaagaacctgggttaaagagcagcagatcccacacttgcccctcccccaaatagataaacccacagctggattttaaaaacaaggacggcatccactgaacaccatcttattgaccgctactgaaacattcactgtttctgtagcaactaattctcagcaggaaatgagctcaaattttaatttttacttttaagagctgtttacacttacctcaagaatattacaataccctgtacaaatatgcacaggagaagatgcataacttgagatacggaagtgccaatggggaaaagaactgcttcagagatgataaaaaaacatggcagcagccactggcacacaaatgggtgcgcacgatggtgcaaacactacgcacagggctgtttgcgcattgtcatctaacaccctcaatctccaatgagttcctcaggatacccaatttctcacttaagaagctgaggttccctaagcctgtaaaacttgtccagagttacacagccaaaactagaagaacctggataaaaaccaggtgtaaatgactcccagacctggtctgaaccactcactgtacccactgtgtgctgtacccactatgtgctgcgaagtacacacagtcacacagataacaacatgacttgtgcctctggaggtacaccttgctgtatatgatgtcatacactgattcatcaataccctatatgtggctttagatattaagaacaagggtataaaggtacattgcaatgaaaacaaccatcttcctggagtttctcttatggatttgttttcacagtattttcattttatcatttatttatgtattacaaataatgttttagtactcttattaaagtcatttaaaatcttttactttcaaatgtttttatatttgacacttcattcattttaagatttattctaaattctttacacatataaattcacttaatcctcagaattcaaaggggcatgtaatattaatggtaccattttatagatgtgcaaactgaagcacttgcccaaggtcctagagtaacagagggaggatttggatgcaggcaatgtgacttcagaaactacaacttagccactagacacactgcctctatgctacattcttagctggttccctgcctccaagccttgctgtccttcaaaaccactaccacataaaagatctctctgtggatattctaacttaaaacaggagcatgacaacatcccatctcccgctcaaagtccttgcaaggacttctcaatgcacttgggataaaattcaaagttccgtaacctggcctgaaaccgtgtatgagctaacccctgcctccatcacagcctcaagaatgcttcctctgagtctactctctggtctttttcttcaaacacatcataatatttttaacttcaaggccttcaaacatgctgtaccatgtgtgtgagtcactcttacccccaactcttttctcagctgacttctgttcactttttacaggttgccttacagtgcctcagagagaggccttcccaatccttcatcgaggagcaggaccatgtttagatgctcccagtacccaacacagggcctggcatattgcagatgttcaacagatacttgttgaacaaacacttgaagtgctactctaatcccaggaactatcaaaagcagaagggagggtaggacatccacagtaattacatagtgcagtgaaataaactctatgacaaaaatatggggaggtattgtgggagaaacggagaggaagcaaagctgagattggagatgccttgagtcagggagggcatccagagaagaatctaatcttggactcgaatttgacgaaattgtgcactagtgaaaagggatggagccagggccttgcagctcattttaggaggctggccattagactacagaatttgggtaaccatagaggggtttttagcaatcagattttgctccagacaaagcagaagagagatgagaggctgactgtaggtagggagatcaatgaagaggtcatttcagtttttcaagagaaatgagaggacagcctgaagcaacatggtgacagcggaaatgggtggaaatggagaaaagaatggatttgaaagatactaaagagaaagaatttaggggacacaatcacagattagacatgctgaataggggagaaaagaagattctctggtttctggctttgtcgacaggacagaatggttctcttaatggattaggagggaatatgggaggatgacaggtttgttcttagactggaacacccagggacttaatgctaatattagactcttatagaacatacggacaaaggatgtgaatagacgtttttgcaaagaaacatacaaatggccaataagcacagggaaaaatgctcaacatctttagtcattagggaaatgcatatcaaaaccacaatgaaataccacttcacacccactgggctgggtattataaaaaaagatacaataacaagtgttgctgtggatgtggagaaattagaacccttatcactggtggtgggaaggtaaaatggtgcagccactttggaaaacagtttggcaattcctgaaaaagttaaatatacatcataagatctagcaattccactcctaggtatgtacccaagagaactgaaaacatgttcacacaaaaacttgtacattaatgttcataacagccaaagagtgacagcagcccaaatatctatcaactggtgaatggataaataaaatgtgatatatccatacaatggaatattattcagccataaaaaggaagtacagatccatgctacaacatggatgaatcttgaaaatactatgctaagtgaaagaagctagacaaaaaaaacgatgttatatgagtctatttatatgaaatgttcagaataggcaaatccatagagacagcaagtagattagtggttagtgcataggggaggcagagaatggggagtagttactgctaataaatacagtgtttctttttggggtgataaaaagttctagaattagtggtagtggttagacaaccttgtgaatatattgaaaaccaccgaactgtggtactttttttttttttttttttttgagatagggtctcactctgttgtccatgctggagggtactggtgccatcttggctcactgcaacctccacctcctggattcaagccatcctcccatctcagcctcccaagtagctgggactacaggcatgtgtcaccacatctggctagttttttgtatttttggtagagacagggttttgccatgttgcccaggctggtgtcgaactcataagctcaagcaatccgccctccttggcctcccaaagtgctgagattacaggtgtgagccaccatgcctggccaaaattgtatatcttaaatgggtgaactgtacggcatataaatcatatctcaattaaaaacaaaaacaaaaaagaacacatggatggcacagggcaggtctgtggcatctgtaactcttacagtgggtcacagaatattaactttcaggatttacaaagtcctgctctaagctctcactaagcttttgaaacctggatctatgaaaataaatacagcattcagtttctagccaaatgtttctccataaacctaaagtttaatgtgtggcttttgtaatctcatcagaatttctgagatgaggtataaacatgttaattagaagaagacaacttcaatcattttctgttctagcctgaaatctcacatatctaaggaaagcattttaattcctatcaagagacagaagtactgcagggttgacagcatcgtgagagtacaacagtggtgttctgaggaaagtaagaagtgcccatggttctagatgctacattacagcctgtgatgctctagcaaccaagatataacactaaccaaaagaacaagacaggatgtgttcttgattctaagatctacttctagcatttcaattctcctaaaatcacaatgaattttacaaatggcatagatggaatatgatggcatttttttcactaagatactaacttctggtatggcttaaaatcgattgatgtcagtaggtggtagtctactcagatggtgttagctagaggcacattttctagctcaatctctctataatggattttatattctaaatgcatgatttctgtgttgaaagaataattatatttgcatatgttttagcagtcaccatgcaaacatggtaagagtggctcttttgctggcaaatgttgatcaaaatatactacccttagaccaatcaggatgtgtggaaattcttttacaaatcaacatataatatttactacattcataagtactctaactgcaaatgaaattattcaactaaaatgtatttccaggaaatttatatataaagtatgtgcaaagaaggcacattagacagttaaatgcattcttccacaattttgaatctaaatactactttctgcatataataccttacacattttcaaagcatgtttatacatttcactataaatttcattcaatacttccccataacaaccctttaagactggcaagaaaaatactacttttttaatttctattttataataaggaagcaaaaaaacagaggttaaatgtgtttctaaggccacagacctggttagtggcagggttaggactctattttgatataactcatctgagttgggtgtcttcctactctgtcacatagcctccacatggaaatggtaaaataattggtaagactaagcattagtacctgtcttacatccaaatgggaccttagcacaggctactgcctaggataaccccacagctctgtacatcctcaactacacacatgcgcaccttttgtgctggcacctgctctgtctccaagcttctgtgctagcctagttccagatccttcagttcctgttaccttctgctagtcatgatctgggatatcacagggcaaagcaatgacgttaaggacaagaaggcactctaccttgcagtcccgagaatgttcacctacaaaatgactcatttaatctttacaacatctcccaaggcaagtcaaggtaattatcccccactgaagcaaaagacaactgaaacacagggaggtgaaagttacaaagttgctgaatggcagatcagagcccagatccatgtcattactgcaatcccagagcaggttccattttaccacatttggtgagaggactcgcactaacccattcacctatatattcattcagcaaatatttaattatatatgatgcatcaggctgtgtaaaagtttgtggggacgggaataaataaaaacggtctttagccctataaatttgccagtttgtgaggacaaagtttaaggagataattacaaattacgataattgcctaagggaaaataacgactactaaagaatgtaacaaggagccctaacttagatgagaacgttagatagaacttctctgaggaggttacatttaagcttaggcatgcagtcaaccaagtgaggaaggagaggagggtccttgcagggggaaatatatgcaaaggccctgaggcaaaaaaaatcacttggcagagggacagtgtgctaggagatgcagctaatgagatattccacaggcagatcatgagccccaccctagactgtaaagaatgtttttatcccgaaatgcaagaagccactgaagacttttcacaagggaatgttataatctgacttacattcttaaaagtgcatttcagccactgtctagtccagaatataaattgcagggagataagagtgacaggtgaatgacacttagaccatgacagtgtcccaggcaaggctggcacagaagagtggaaatataaatggataagagtgactttcaaaggagaacaaagcttggttgttaaatccaaaggatccagggactgcatcatgatccaagaggcccaggatacacctttaacatcttaccctcaaagaaaatttaaaaacagggcatacatctaaagtcaagagacagtaagtttctccagcttgttgtggcagccagctaccatttttttttttaatggttagctgtctccatattactttgagccaaatagagaaggcactccccaaagaccactgcaacaaccttcctaagctattaccaagaattgggatctaagaaactaggacacagctgaatcaagactgctgagaaccatttcctaaggtcagagatttttccctgcttaggaaagtccaagacccaaagtgataaacattctcatccatataggcatgatttcaaatgtctttttctttcaaaggaaattcagatggcattgtcttaagaacagcccagacacgtttatatagcttccgtgctttatgttaatgtaagaatgaaaaacaaactgtctcgccattttcagtctcaataccaaattgtgtaacactgaacactcacccttgggtttctataacatgagaaccaaggagtggaagggacacataggagagagtcgcaaaactcaccaccaaattgcaactattctgatgcctgtcttctgccaaagggcaagggttctcttggccaaagctgagttccaacaggcactgcctccagggcagcagatggccattcagtacgtaagcattagtaggaccctcttttatatttatacatggattcaagcctgggagaagtcttattgttccttgcttagaggaaaccatcttgggtcacacaaccagtgagtggtaaagcttaggttggaagttctcaggcaacagggacatggttctgggacatgaaattctaaaacaagagtgttcacgaagcttagaagttcttactaggcaattccccccaaaaatcctaatcagaagaaaagtgagtgttgctatggaaaccagtgagcttgctctgatcttaaaaggtcacactaaaccttaggaaggcaaattgaaggaaatacttcgattcacccttacagggtgaatgtaagaaagaggatggcgaggaaaggtacattcactcagaaacccaaagacaagaatgaactgaggattacagaaatcattcagacaacaaaattaggctttaggaatgggctcgttaaaataccatgaatatttttctatatagcaaatcaaggatggagtatttctggtgcttggggttaaggaaacttccattcagcttctttaaagaaaattttctttagatagaaaggaagaaatgaacattggtaaggcagaacgaaagtccaagattaatcaaaagattataaaagagcactgggctggttcaaaatgggttcatgtcacctggcatggttttatgcttcttttcaacaacttggaaattttattactgatccactgttggtgaaatttaaggaaggaattagggagaactgggcatcactaaggcctctgtgaaggttctcatgatattcctgttgactagatggtatattgggattgaacaacttggagaactgttctaataatgagcatgtccacagcatgctaatgaagatgggggctggctcaagccttgccaaagaccccttcactcagctcttgcctggcaggcacaagctgcaacttgaatggtaacacagaaggcaagattctcacatctctggttaggatgaagcccagggtggtagtgaacttcctgtccaaccaaatcaggatctgataatctgtacatgctgaaaaattaaaataaggatcaataaaaggcatggatttgagatctaaaaacaaagtgtacaaatacacggagagcagaaatttaggagatgctagttaaactatcagaaagacaaaacaaaaccatctctacagatgtcagcagacaagtatgcttagtatgctgtcacccagagctctagcaaaccttaggcttcattgatggaagcctgatttaggaagatgaaggtggagatccataattttgctctattcaaggcaaatcaggccatttgttaatgatgcattcagtgcttaatgctacccataaaaggagtagagaaaaactaacctatgaaggcaagtaatcaagatggtaaaaagacttaaaaccatgacacacgaggatgttcaacttaggaaaagaaaacacaagtgggcaggagagctgttttgaaattatatgcagtcagatgggagagggtatgtacagtataggtccccaggacgtagaactggccccaagagcggaaaccagctgaacaaggtgaaacagtgttgcccaaaagtctgagttcaccatcatttgaggcttccaatgggggctgagtgccacttcacagaaataatgtggaaaagactggctgaatttagccaccttagtagtcccttacaaacccaacatcccgttatgtaagttcagtgatcagttttctccattgtacccagttgccgaaggtgttgaatccaatgatgtagctgccacatactattttttaagcacacacccacattatggctttccttcagcaagaattggaacaggctccagtcggcacttgcgcccatcttacgtacaagtttcagttctttctgcccctacaaacacactgttgcccaatttatttcttgcagtctctaatctcagaaaaaaaagttattgtgttcactgacctagggtacgcatattttgctctaattagaaatacagtctatgctcagtctgagatagccactctggaggcgtattcttggccagatctttaaaaatcttggcagtatcctcctcccaggacttatactgtgtgagcagcctgctattatgggctgttttcatggctgttgtgtccgcagatgcaccagggccatctgcaaaggcttcctgatattgaacacagaccatgagatagtatgaaggcatgctcctgcagtgaggcactaagcactttctgcagagattgggggcccctcacctacagagcagtcagtgctctcggctgagcgctcaacatctgcttctagcatcactgcccgagctccttcaaaagcattttgttccaaggtaccacgcgatacggtaatagtaattaacatcagttgagcttaccaactctgctgaacactcgatgtactctctctctctattctctgaactctccatgaaatatatatgattttcctcatttttgagatgaagcaaaccaaaaaagtcatatggctgttaagtggcccggcagatatcccctctcagaccccggactgcttgcaatcttaaagcattctgttccacctggcacagccacactgggtgaatgaatgattcacatccacatttgctgagtgaaaccaggagaacacacaggaatgattcagaggtttgcactattagacattcaactcccagtcaatgactattattttgtatttgcaggaaagcttgcccagacattttaaataaagaagaaagaggtaaggcagaagccctctttattttttcttttttgaggcggggtctcgctctatcgtccaggctggagtgcagtagcacaatctcggctcactgcaagctccgcctccagggttcacaccattctcctgtctcagcctcctgagttgctgagactacaggcgcccgccaccacgcccggctaattttttgtatttttagtagagatgggggtttcaccatgttagccaggatggtctggatctcctgacctcgtgatccacccacctcggcctcccaaagtgctgggattacaggcgtgagccaccgcgcccagcctgaagccctctattttaatgtctaatactaaattctactttgttctcaatgcctgtttctatttttaaaatgttacctatactgaaaaggaaacatgttcttcatccccgctttgacccccatcagggtgtggcacacgatggagatggaaagaatctacccagggcactatctgagaagaaaatctcaggaggaaataatacaccatggtttgattcctcttatagaacagctggtttcaatttgatactattttttgctaattttagtttttactcaagacagaagtagctttaacacttgatggtctggtttttaaagtgtgttttaaggaatcctaccagtcctaaaaagggtcccatgggaggatggtggctggagggtaggggttggagttctaagattttgtttgaaacaatgattacgcttaaaaaaaaaaaaaaaaaaaaaaaaaaaaagaggccaggcatggtggctcatgcctgtaatcccagcactctgggaggccgaggcaggtggatcacttgaggtcaggagttcgagaccagcctggccaacatggcgaaaccccatctctactaaaaatacaaaaattggccagatgtggtgacacgcacctgtagtcccaattactcgggaggctaaggcaggagaatggcttgaatccgtaaggcggaggttgctgtgagcagagatcgcgccactgcactccagcctgggtgacagggcaagactccgtctcaaaaaaagaaaaaaaaagaaaactactgattgaaggtatctgtgagataaaaatattttccctcgttcagagcacctgcgatggcaagtggattctgctctgttggaagctgattttgaacagaatccattttcaccatataggcttggtctagtcaatttgtactaacgtcttaccctctaggtgggggcgagagcaggaggtcccaatgagtcaccgtttagcaggaagtgtttctttcgctattttccttctctatcctcctctggaggctgtggtggatcttctctcctcctcaaaatagatgtaaacgatatgaataaaccaggggttcaattctggttgcacattagaatattctgtagtgcttcatgtatgtttattgcagcactattcacaatagcaaagacttggaaccaacccaaatgtccaccaaagatagactggataaagaaaatatggcacatatataccatggaatactatgcagccataaaaaaggatgagttcatgccctttttagggacacggatgaagctggaaaccatcattctcagcaaaatatcataaggacagaaaaccaaacaccacatgttctcagtcataagtgggagttgaacaatgagaacacatggacacagggaggggaacatcccacactggggcctgttggggtacgggaggttgggggagggatagcgttaggagaaatacctagtgtaaatgacgagttgatgggtgcagcaaaccgacatggcacatgtataactatgtaacaaacttgcaggttgtgcacatgtaccctagaacttaaagtataataataataataaaaaattaaaaaaataaaaaaagaatgttctgtagtgcttaaaactggtattgctggccaggcgcctctgcacactaattaaattggaatctctgggaagttgggtcagctttagcatttctgaaatatgcctcaggtgattgtgctgggcaactagggtagacagcctggattagacactctattctaaagtcatttatgccacaggcaaatgtctacaggtctgccaaattatattattgaagatctttatttttcaaaacctacaaactttaaaagctgacctttggaaaatgaattttactctgacttaagcatgctcattgaaaggagagagagagaaaaaagttgttaaaatagaacaattatacatgtatacatatgcatatacacacacacataaatacctctctgatataatttagatgtaatttagtagaaaacagacatcttcccaattgagagcagcctgcattgtgaaatactgctctaacaaagtcaatgaattaatttgcaaagatcaagtttggccaggatgattgttggggcagggtattaggtgccctcttcatttggccaattactacacatctcagagattgtaacttccattatttctttgtgaacccttgctgagccccaagactagatcggggggcttcccctgcctgccagaacccagcaggcacttgagtttgcaacccccagcctggaagctgcaccataaaggcatgcacacttatacacttgaggggagacaatctgatttcccccagtgcacgtcgtgattaccctccatcagcactcccgattccattctccttgtgtcttcctctgactgggaatcagctgtaaagctggcctcatctgctcctccccaggctgggaagagaaaattgtgtcattctgcagacttatgccaccacaattctttcacttgtcccgtgctcagctccacctcaaaacatttctaagtagctaagcctgtttttctctcttccttcctcaaccccttatgtgtgaacattcccttctccaggtgctcgccctgctaccccagatgatccaccgagtggagtcacctggttctaactaccatgcatatgttggggaaccatcctctgtgtctgcagcccagactcctaatgagctcttggacccacgttcgtgagcaggatacatgatggtccacaggcacttcagaacttcagcaagccacagaactcatcagttactcccctccaccctcgaatggtgtccccttgtaactccaatctcagtgatctaacataagaaggcacaaagttgccctagttaagaaaactgggagtcatctgtgatggctttgtggtgtcattttggccaggctaaacaatatccccataattccctttctagtatgtttctgattagggtgggctacaaggaagaccttctcctgaaagttggtagatggaagggagatgtggccgtctgtagcacccacatacactcactcaaatatgcaatccaacatgaatctaggtgctgctgtgaagggattttgcagatgtaattaaagtccctaatcaggtgactttataggagattatgctaaataagctgataatcagtggaaggcagagaggagagagagataaaaagagaaaagggaaagaagacaggaaggaagggggaggggggaagaaaaagaaagagaaagaatgttgcaggagaaagggaggaaaaagaattgcttcctacctgtgggcaacaagattcagcctatgggattccaaattgcctagccagttctcaattgcataagccaattccttgcaatgcatccctttaattcatacatatctagatacccacatattcactttgtagctacttgttctgtttctctggttgaaccctgacaaaccctgacatcaatgtttcctcttccctcctcacctcagctcaaatcaagttgattccatctcttcaatagttctctgattcaatccctcctctccagaaacagggtcaatgccttagttccagctgccatcgcttgcttggcataatgcaaaacccacctacactggtctccctgcctctggtttccctcttcaccaatccactctccagatcagccttgttcaacagaagcttctatgatggacatgttctagatctgtcctgtccaatctagtagctaccagctacatatttaacagcacaattctagactatcagggttttgtcctaaaaaaatccaagaaacatgccaaataattcagacatttctcaaaaacaaagtaagtcaaatactggaaactgtccaacaatactaataaataaaatgaaagtaaatctatacatatgcaaaagatgagggaatatattaagctatggtgatgaactctgtgtattgaaactcttcaactcattcaataaatgattgctaagcatctatacactatgtgccaggtgccctgctagagtctggagattgtagactggacagtccctgttttgccaccctacagaggctttacataccagattgagtagctacgcaaagtctatcctgtgtggtgagaggtataacaggtgctagagctggggcaggcagccaaggctttgccccagggcactgacctttcgagaaccccaaagccagataacatgtaattgtaaaaaccacatatttaaagcccctccagtcccagatgcacctctagcagcttctaggaatggacagagctagagacttggatcagacgcagcccaagagtccttggaaacaggggcagagtggggctgtcccacttgtatccctttcgttgcaaggacaaagcaccattctccttgctccacgttccaaaatggtaagctaggtcctgcagggtccctaagggagtcaacagaagggcaaacccaaacccgggtcaagtatttcttctttgttgttttctgtgctttctggtatttttataatagaaatattgctttatttcagaaatgcaagtctgatgtcacttctgtttaaaaattccttagaaatactgagcaattttccaaactgtctcacatatacccccagtgcggtttcatgcctcagtgcctttgcacgtgcagctgcttctgcttggtatggccaccctccacccccaccgccactccccagccccatctgtttagcaaaggcctattcaacctctgaaactcagcctaaatagctctcctgtgaaatgtttcactcctcagaaagaatcactgtagtatatttatttatttctgtgagtaacctccactaaaatgtatacttcttgaggtcagaaactgtttttgctagcccagcacctagccctgaatctggtattacagaagaaaggagcttctcataccaccctcctccatcctgctcacttctgcctacctgcagctcacctctcagacatacaagggatggggagaagttgctaatctgcttcctctgaacacaggatgctgacaggccaccgtaaccagccatggagtagtggggtcttatgaagcaggaactcgggactcccagctgaaccagtactgcccccacccattacccccgggctccatgagtggatcaatggactcagtggcctttaatctgagttagggtgcagtactagatgcttttgaagcttctcatgaagtagattctgagtcccaagttagaaagcctcccagaacctcaaagcagggcatgaagtattggcagggcacaatataaatattcatgacccttggataaattacatcaacatagcacccaaacctgaccatcgatctctaacatgagcaatacggcaaaccatgtttgaaaagactaacctgcttgtagtaagaacatactagaagcaagaaagcctagattctgatcgtggaaaacctgtgcaccattaacagtctccactttgtcacttgtaaaatgaatgcactgaggatagagtcaactatcctgattatatggcagtttgagttttcaaaaataccttgccaggacccaaaccaacaattcaaagctcaggaattagtgccagcaggaggcatttcctcacataattgcatccttctcagacagctggattctgtgtcattagaagaagaaaaaagacaacagagtctgaggtctatttcttagattctcagtattctgttacagcttcgcatgcacgtgacaagtcacctggagaggccccttcgacagagatgagaacaaacagacaaaagagatgagaacaaacagacaaaagtcccagagggaatcacaccacacactattaatgtgaccaaacttgaactcaaatgttcagattacactgcctggtgacccccgtccctggcaaatcagtgagatgaaatctcttacagatactgaatttgtactagttgattgcttatcacgaaatatgaagtatagactgggcacggtgactcaaacctgtaatcccagcacttgagaggctgaggcagacagatcacctgaggtcaagagttcgagaccagcctggccgacatggtgaaatcctgtcttgacaaaagcaccaaaatgaaaaaaaaaaaaaatagtcaggcatagtggcaggtgcctgtaatcccagctatttgggaagctgaggtaggagaatcacttgaaccccagaggcagaggctgtggtgagctgagatcatgccactgcactccagcctgggcaacaagaatgaaactccatatcaaaaaaaaaaaaaaaaagaaagaaagaaagagagaaaagaaaaaaaagaaatatcaggtgtaatttcaccttgatttattaaaaataagagacctattaggaatgggtggatcctggaacagaagacaagacagtggaaaagctggttctgaacaaagctcatactttagttaatagtagttatacggtattgtgtattggttttctactactaggtaacaatttacacaaacttacaacacatgtttattatcttgtttctgtaggtcagaaatttgggcatggtagagttgaatctcacaaaactaaaattaaggtgtcggcacatcaaggttctcatttggagattgaggttcactttcaagttcatcctggctgctggcagaactcagttccttgcagctgcagtattgagggtgtattagtctattttcatgctgctgataaagacacacccgagtctgggaagaaaaagaggtttaattggacttacagttccacatggctggggaggcctcagaatcatggcgggaggtgaaaggcacttcttacatggtggcgacaaaagaaaatagggaagaagcaaaagtagaaacccctgataaacccatcagatctcatgagacttattcactatcacgagaatagcacaggcaagaccagcccccatggttcaatgatctccccctgggtccctcccacaacacatgggaattctaggagatacgattcaagttgagatttgggtggggacacagccaaaccatatcagagggccctgttttcttgttggctattggtctcagctcctagaggacacctggctccttccttaggcagttcacaacagggctcttccctgttgctaggacagcaaaagagggttggctgctgcttcttgtctctcataagggctcatctgattaggtcaggcccacctgggataaactcccttttgaatactcagagtctactgatgagaaaccttagttacacagcaaaatcccttctaccatataatgtaccacaatcacagtgtgctagtccatcatattcacaagtcctgcccacactcaaggggattacacagggcacacacagtagagggctggaatcttgggggtcaacttataattctgcctaccataggtactcatgtcaatttcttagttttgatcattatactatgtttatgtaagacgttaacaactgtggaaacaggaaaatactgaatgatttttgtcatttttctgtatctcaaactgaaaaattttaaaacatggaatactcatgtgctgtgaattaacacaataatttgcatatctgtgccatcttctcttctggcttatgttgctatgttgaatttgccagttcatgaaatatcaggtatcatttcacctgcttatagtaacatcagggctataaaacttctctaaagtcacacatcaaatcaaattagtgagataagccttacagaacaccacagtgctactgctttaccttaaataaaggtgaatagtccagaattcaagataacccttacaaaaaggctatgtgaaaggctactatacatctacagtcaatattttttcaagtataaagtttctcaccagtgcactgcctttggttagcccagttgctttttaaacgtttcatcactattgtctttgggcctttatatctcatatggtttctgacactctacgccatgactatctttagtaagcaagcatcacatcagacacatgtgcacacacagtctctatataacttctgagtaccaaatctctgttaattggagataccctctgttataggtaatttacaaaactatgtactatgctctcaaagaataaggtgttaatccaagttattttgtgcattttggatgtgtacaatctcatataactggattatccgattaaaattctatggttggaaaagtgctgtattttttttttaacaataaacagcagaaactgaacagtagcactgaaagcatctagtcactctgttaggaatgtctacacctcctcagagaatatctatgaatgcataagaccttattttctaaccttgctggctgcaagatgttaccagaaatgtcaatcaatcagaagaaatttaactaattcacaaaacttctaaaatttcactccaaagtatttcattatcagaagtgacaaatcagggtaagcagctcaacacaattatttcatcacaggaatgtctttaaatagttgtcacatacagaatatttgggacttttcaaatctttaaaaactcaatttatgcagagagaaaggcatgagaaagcctggtaagggccagaactgctgaaacaaagggtttgccactgcggttttaactcagtaaaggatggaatcatgttggcatttagaaagcaaaacccggtggcaggtaggctggaggggaaagcgatgggaagaccagcctgcctacctaaaagtggctatctaagccagaaatgaggaagcactgctgtacagggggacaggaagtgagacagagaactggccgaagaatgaatggggactccattaagaagctgtatacaaggactccggccagtagactggatgtggagaaagagggaggtgccatgtttctcaccggctgagacagagggacagtagacatttccacagacaggccaagtgagatgaaggcagaaaatacactggtagtacagggtaagagaagtggtcacagagttgcatagagtgtgtccaattaacaaaagtgcagcttccaaaagttcatgtatgaaacaaatctttcttaaacatctaccatgtgtcagttacagtactagactttggaatacaaagatatctaagatgtggaccttgctgctccttaggaatctagccagcctaatgacggacatgtaaaacacgttttcatgttcaagtgacaattgccaatgcttattgagcagttattaatgtaccaggcatgatgctaggagccttaattgcatttgtttattcacttgacatatttattaagcactatactaagtgctaggctgttttagattctaagaatattatactgaatcagacagccaaggaccctgctctcatggtgcttattttatttgtgggaaaccagacaataaataagtaaataatgagcgaggtgatttcaaatagtggtatgcacagggaagacaaggaggaagatacgactgcattgggggaagggtagacttgtactaaatataggtgatggtcatggagggccacaaagagcacatctgaactcagacctgtaagacaaggaggtacccactggcaaaggcaatggcagtgttccaggctgaggggagagcaactgcaaaggtctgaagtggaggcaagtttgcatggttagagaacagaaatgaagccagggtgactggagctgggtggcaatgctcctcaaggtggtcaaggacctagaagccacagaagggcatgcaagcatgagcgacatgatctgacatttttcaagatcattctgggagctgaatgtggtatgaatggatgcaggaaaagcagttaggagtccagaagaggctgtagtgaagatggagagaagaggatgattatggcatatgtttcagaggtggagacaaaagaacacgctgatgagggggatgatgatgagacaaagaacagagcctgagtatccacttcatcaactaggtggatggtggcaccatttgctgaaatttataaaatggagggagaggcaggaattacaggaaagggaacaaaggcattgaaaattcagagctctgcccatgaggaagaagccaaggggagtcgtccagtagttgtttcagtcaagggtctggaactcagggctggggacacacatttggtcaccatctacctatgaatggtatttagagacactggaataaaaaagactggaaccgagaaacaagccctggttgttcagacaaaggaagagccagcaaaggaaacttcagacacagcatcccaggaagacagaagaaaaccaagaaactatcgtcagagatgccaacataagaaaagggtgtttcaaggaggaagtgggccatggagctataatactgctaaataaataatcttgcaaggaacccctgtattttgtaacacggaagtcactggtgacattataaaaaacagtttcaagggcaagttagggaggaagtctggataagggtcggggagaggagagaatggaatataaggtaaaacaaggatatacaagcaactttacaggcatttacccagattttcccatttgatccccacaattaagtccattttacaattgagaggatacttggctaaagtcttgtgagtgatgcaaggtgacgaagccagaattaggaacctccagagagattccagagctcgcattctttaacactaatgtggaacttcaaaaagttgcgtatgacataaaggagggtttgtggtaaactatgcccatggttgtcaaactaaactacctagaatccctagcaatgactctttagaaactgtggcccaaactgattagaaaccaggcccaagagttagctgcctgtccacctgcagtcttaacccacttccattccacagtcagaatttcaaaatcaaaatcaagaggttcttggaagacccaatattgtcatgatatcagatattcccaacttgatctacatactcaatgcaattccaatcaaaatttcagcacattattttgtggatactgacaaactgatcctaaagtttaaatgggaaggcaaaagacccagaataatcaatacaatactgaaggaagaagaagaacaaagagggctgacactacctgacttcaagacttatagctgggcactgtggtgtgtacttgctatagtcctaactactcacaaggctgaggcgagagattacttgagcccaggagttcaagtccatctggggtaacatagcaagatcctgtctctaaaaaaatttaaaaaatatatatataaaaatataatgtaaagttacatttatcaagaacgtctagtgttggcaaatgaacaaataccagtagaccaacggaacagaagacagagcccagaaatagacccacataaatacagtcaactgatctttgacaaaggagcaagagcaatacaatggagcacagataatcttttcaacaaaccgtgctggaacaactagaaatccacatgcaaaaaaatgactctagacacagattttacacatttcacaaaaattaatttgaaatgaatcgcaaacctaaatttaaaacacaaaactataaaacttctagaaaataacgtagtagaaaatctacgtggccttgagtttggcaatgagttttaaaatacaatgtcaaaggtacgatctctgaaagaaataattgataagctagactttattaaaattaagatttctgctctgcaatagacactgtcaagaaaatggagagacaaaccacagactggcagaaaatatttgccaaagacatatctggtaaaggattattattgaaaacatactaagaactcttaaaactcaacaataaaaaaacagcctgattagaaaatgggccaaagactttatcaggcatctcaccaaagataaacagaaggcaaataaacatattaaaaagtgttccaggttggacatgccggtggctcatgcctgtaatcccagcactttaggaggctgaagtagaaggatcgcttgatcccaggtatttgagaccagcctgggcaacattggtgcaaccccatcttacaaacaaaaaaataagccaggtgtggttgtgcacacctgtagtctcaactactcaggaggccgaagtgggaggaacgcttgagcctggaaggtcaagactgcagtgaacaatgatcgtgccaattttgtgtgtgggttgagtgaatatgggaaatctctgtgctttctgctcaattttgttgtgaacctaaatctgttctaaaaaataaagtctatttgaaaaataaaagggttcctgaacatttaccatctgtagacattgttatgaaagaattgagggtaagttttagcagccccgaaaggtaaacagctattagcaactgaaaaacatcacgttattttgaaatctttcaataagtgattaatggagtcaacacttattgattgggaatatatataatatcatttcgtgtgtgtgtatacacacacacacacacacacacacacacacacacacacatatatatatatgaatgaaacagcaagaaaacatgtctaacacttaactcctttaagacttgactgtttgaaggccaggcgtggtgactcatgcctgtaaccccagcactttgggaggccaaggcaggcggctcacctgaggcaggagttcaggaccagcctgactaacatgttgaaatcccatctctactcaaaatatcaaaattagccgggcgtggtggtgggcgcctgtaatcccagctacttgggatgctgagacaggagaatcgcttgatcccaggaggtggaggttgcagtgagccaagatcacgccattgcactccagtctgggcaacagagcaagactctcaaaaaaaaaaaaaaaaaaaaagacttggctgtttgaattctagagcatatttttccttaaaagtgatgtaagttcttcataatcttgttacacactctctctgggaaaatgcattccatatacgaatggaaatactcatatcatacctatatgggaaactccataaaagcagcaatcataaaaggctcagtgcctggtacatttatccagtctaagatcaaccaataagatgaaccattagtttacagactgctaagaaagccaagtaaactgatacaatgctttcttttcatttacaattattgaagaagcttttagataattagatttttccatgtgtcaaccatgtacctacatgaaaattaaaataagttggccaagattttcttaacacatcttcacctgcccagtttgcctcttctcaatcattttaactcagatgctaatgtccatttcttccatcatatgctccactattgtctctgggacatttttctagctgtcctatactcaatatgccagttttgaggctggtgcttttttgttcttacctagtatcacgacagagggcctttagaataactaagactcatatctttggtgactaaaagtgccacaaggttagcagttgtcgagtcttgccgaaagaattacaagtggatcactatactcttcagtgaatatattctttactgttcagatacacatctgtgaaagcgatcaagaacctatatactgggtgagttatatgggggctctgggacatctgttccagactactgagtcatttcttcttcagtttggctgaagtgtgtgtgtgcatgtgtatgtgcaggcgtgtagataaacgataacatctttgggtaagaactcttaggaattgttttgcagtttatgattaacttatggctacaactttcagccaccaccaattgtgcaaagtatcacagaaacttttcacagcctctgctcatgcctttgatctctgtagtacctttaacatttcaaaaaaaatttacagccttttaaagcacactgagtttttatcagcatttcctatctgtctaaattcaactttttttcccagttaaatcactagaaaataagtagctacagttcaaagtcagcaggaagtttgataaattgatgttctacgcttcaacaacagtcctgtgtaacctatgaattggacataccagcctcttactgctttgaaattcctttcatctctttgaagagatctaccaatttttcctgctttcagttgcataatttgtcacctaggacgcaatacttttgccataactctgtaacacagcttcagctacttgtcttctgcctcaggccctccacagttcctggttgcttctttgcaaaaatagcaactgaggtcattcttgtacaaaaatttgcttcactaatcccaaatttacatcctgttgctctacttctataactttctacacatataaacccgtttttaaattttgagtcacaatttaaaatatttgaagatattttatatgcaactaaactcaatatgtgtttaccaacagtatacatcaacacaattgttatgtccaaatttgcacaagctcacataatgacaatgacttatcattgccatctagtcaatggtgataagatgctatcaacagtaaatacatcctgatttcagagaaattaaaatgtgggggcaaatgtacatttcaaaagtaaggcataagtggatactcctttaatttatgtaaaaaaatcatttccaaaaatggacatcagaaattcctcccatctctgtatagacatgccattcctcccatcaagaaacaaagtcctggtccctcacttgtgacttgctttcagcaacagaacatggcagaagtgagattctgagactttaagctcaagtattaagaagcttgggctacagtctagagaaggggttggtgaactatggtccagtgggtcaaatctggtctgtttttatactgcctctgagctaaggatagctttcatattttaaaagagttttaaaataagaaaatatgtgacagagatcgtatgggccccaaagctatgaggcctaaagtatttactaactggctgtatttatttgctagggttgccttaacaaaataccacagactcagtggcttcaacaacataaatttgtaccttcacagttctggaggctaaaagtccaacatcaagatgtcagcagagtttatttcttctgaggcctctctccttgaaggtggtcttccctgtctgcatgtctgtgtactaatctccttttcttataaggatatcagtcatattgagtcataatgaattagggcccacttgacctcatttaacctttttttttctgagacagggtttcactctgttgccctagctgaagtgcaatgacatgatcatggctcactgcagcctctatttcctgggctcaagcaatcctgccacttcagcctcccaggtagctgggactacagatgcatgccaccatgcctggctaatatgtgtgtgtgcgggggggagggggtgtggtttttctttttcaggtaaagacaaggtttaccatgttgcccaggttggtcttgagcttctggcctcaagtgatccacctgcctcagcctcccaaagtgctaggattacaggtgtgaaccaccacaccccgcgttcatttaatctgaattacctctttaaaggccctatctccaaatatagtcacattctgaggtactaggggttaggacttcaacatatgaattttgggggacacaattcagcctttaacactggtctttttcagaaaatgttcccaatctctgggccacactattgaatgagaagagaccaggtggagagagaggctcagccagacatcagccattacagcttcacactagctagacgtgcgaataaagcccccttggatggtccagccacagccaagctctcagctaaatgcagccacctaagcgactcctgacaatacaatgtagagcagagacaagccatctcattgaaccccatcaaaactgcaggctcatgatcaaataaatggttgtgtttaagtcactaagttgggagtgttttaaactcagcaatagatgacgggaataacttccgtggcagaggccccaggataggagctcccaggcatggaaccaaaagggagaagggctttttataggggtgacagcaaaggaagagttgggataaaaggcaagggcaagaatatacagtagccaagacccaaaaaggtatttagatgagaacgttgctcctcgtgttaacaaggaactctcctagtatgtatattgaaagtagggttgtatcagagagtagatggctgcagtgaaaaggacaaaagccccaaaacaaatcccaggaaacatccaggttctgcctcaaattagctttggtaagatacttatactcttagctgttccgtgtcctcatctataaaacagggacaatacaacctacctcccagatttaaaaatattagacataaaagtatgcagtccttagcatagcactggacaaatggtaggcataccaccttgtctgtgtttcagtctttccaaaagatgtaatgcctatcctatttgaaaggcttattcataagttcaaatttgctaggcgccgtggctcacgcctttaatctccacatgttgggaggccaaagaggaaggctcaattgagcccaggagttcagattcaataaaacacacaaaaatggtttgaaaggtattaagccctaccaaataatacgattgcaatatattaaaatacaatttttattgttgggggctgcatggcaactttgtaaaacttaagtatatctgcataattgtttttatatagttactgttaaagttaccagcatcagttgtttattctagttattcatctccatcttcagaaaggaaggtcagcacaggatctgaagaaggaaaatgaagataggaggaacttcataactccattctttttttgtgtttcagcaacacccccgtctatttagcggggcatccccagagcagttccactatgtgtcctctttatcaccagcgggacttagcactgggcttggtataaaagagatactgaatatttactgaacatagaagagagggcaagccaatagtctcagaaagaattaaggagatatcccctttaatgtgatttttacatgcaactcaatggtggtattggttcattttggaaagatgaccctaaatggacaagttcaatgacaatcactgcccaaacctataagtgcctatgtttgaaggccaggggcacagggtagtggttctcaatgtgtagtgcttagaccaacagcagcagcagcacctgggactcattagaaagcaaattctactgccctactgctacggtttgcatagggtttgtttgtttgaccccaccaagtctcatattgaaatctgatccccaatgttgaatgtggggcatggtgggaggtgtttgggccatgggagcagatccctcacaaatagattggtggaattctcaagggagtgagtgacttctcttcattcctgcaataactggttgttgaaaagagcctgggggcctcctctgcacttgcactcacttactctcttcctctcacgccatctgatctgtgcatatgcaggctcccctttgccttccaccatgagtggaagcagcctgaggccctcatcagaagtggagcaggtgctggagccatgcttcttgtacagcctgcagaaccatgagccaactaaacctcctttctttataaattacccagcctcaggtattcctttataacaaaataaatagactaagagacccacccagaactaccaagcaaataatagtttaataagccctataggtgattctgatacacattagagaatcagtagcctagggaaatgcatttctattatcagctacatttggtaacaaaatgtctattccctttgtgtttcacaaactagcttattcagatgatgtgaataccggctaattattgcaacgatgtttgcttccaagcattaaaaaaattgccagtgttatgggcaaggacttcatgactacaacaccaaaagcaatggcaagaaaagccaaaatagacaaatgggatctaagtaaactaaagagcttctgcacagcaaaagaaactaccatcagagtgaacaggcaacctacagaatgggagaaaatttttgcaatctacccatctgacaaagggctaatatccagaacctacaaagaacttaaacaaatttacaagaaaaaatcaaacaaccccatcaaaaagtgggcgaaggacatgaacagacacttctcaaaagaagacatttatgcagccaacagacatatgaaaaaatgctcatcatcactggccatcagagaaatgcaaatcaaaaccacagtgaggtaccatctcacaccagttagaatggagatcgttaaaaagtcaggaaacaacaggtgctggaaaggatgtggagaaataggaacgcttttacactgttggtgggactgtaaactagttcaaccattgtggaagacagtgtggcgattcctcaaggatctagaactagaaataccatttgacccagccatcccattaccgggtatatacccaaaggcttataaatcatgctgctataaagacacatgctcacatatgtttattgcggcactattcacaatagcaaagacttggaaccaacccaaatgtccatcaatgatagactggattaagaaaatgtggcacacatacactatggaatactatgcagtcataaaaaaggatgagttcatgtcctttgtagggacatggatgaagctggaaaccatcattttgagcaaactatcacaaggacagaaaaccaagtatcacatattctcactcgcaggtgggaattgaacaatgagaacacttggacacagggtggggaacatcacacaccggggcctgttgcggggtggggggaggggggagggataacattaggaaaaatacctaatgtaaatgacgagttaatgggtgcagcacacaaacatggcacatgtatacatatgtgacaaacctgcacattgtgcacatgtaccctagaacttaaagtataataaaaaaaaattgccagtgttttttccctactcccttgtgccctcccccattataaaaatcaaataaaataaaaccacagccctttgcaattcacgccacatacactaataacagcctcaggcaagcagtatctgtgggactcatttaaattttattttcgtggaagaataaaggaaaattcaacaccaaatctttaagacacaccacttaatgattttggtgaacagtctgaaatagacagttattggagcctttgattaagacaatacaatgtctacaatgacctatcaagcaggtgtccataccctgtaagaaccttgtccacacttcagcctctgatgaagcatgtatgggtacaccttgtgtgtgacagccccaatagctggaatggtgtgggatcccaatgaaggacacccagccttggcatggcaatctacctatgactttgtggcttggctgaaagatttcagctgggtcaagcagaagatctctttcaagactctaaaccaagaaatacaggagggtcttgccaactaactatgggaactaaaccaagagagcagtgaattctcggggagcaccatgagaagccatgatgggctactgccaaactgaagtgatgtggggaacagaaggtgtaatggagtggggaaaagccagtccatcacaagtggggaatagtgcagagatgcagaaagaaacagcctatcaccagcaggaaggactggacaaagaaactgacccttagcctaaagaagccagggtaccaactgtatagtccagcccagcccagcttggggaacagtcactataggtcctctccttctgctgccacccacacctcataaatgagttaaactatagcacataatcatccttaaatggtggcaataaacacttctgcatttcattgtcaatggatgcataatagatgcaaaatacttccaaggttaactaaatgaattattgtagatgtctaaagtgagggtgaactctgttttttcttttaaaatgatccatctgtttatcaaggcaataagtttttaagttaattaagtacggagcagaaagtcctccaagcagacacttttaattaattcttaattatgaatgcccacgtatgtcctccaagtggccaaaaatattcagtgtggggcgacaaaggaaaaaacgcactgaaaagagaacagacaccactcctggttttgatactttttaggttaaatttaccaaatgttataaacagctttaaaaatacttacctttagggtggttttcaaaacagtgcaaacatacacaaatcacaacacacttcttaatttgttcctctttgttgtcacgtgttgctaagagactgtctttttcagggctcaaatacacagattttttccaaatttagaaaataggcatacttgcaaagaagcctcaaaaaggcagccagttagaggtagaaatttatttggtaattaccaacccacatttctccaaacaacttcctgaaacatattactgaatgcctgtatgactcatggaaacttcaaaattgatcatctctggctctgtggcaatctgctttcttaatttacatacattaaagtttgtgtaccctctactccttactgaaggaaaacaggaaagtcaaccttccactgaaagagaagcagccgtccactgggttcagacactgggaaggccactgaaaggctcgtgtacatcaagatttctcatgagtggttaggggatgttgatcactcttagggataaactgtaatcaaagatcagtatgtgaagccgggaacaatagcatatattaacagtaatacgtgttattacagtcatattctagttccttaatttatacagtatgttattaaacagatatatcatagcataatggtatcacaaaagactactttttcccttaaaactcctaggtgcacttttgtatgtatttttttattagctatctgacagcctggggaaagacacaaaaaggcgataggtgcccatgacaactggtgatcaaaaagcccaacaaaagctgggcgtggtggctcacacctgtaataccagacacttgggaggccaaggtgggaggaccacttgaggccaggagtttgagatcagcctaggcaacacagagagacccccatccctaaaaacactaaaaaaaattaaaaatttaaactcaatataactgaaactagatggtaaatcaatgaggaaatggctaagtttacaaaagtctgactgacaaacctcagagacgcacccctctctttaaaaaggatgcactttgacattttaaaatatctatgtgcatagttattaaagagcttttatatgggccccttaactaacagcagagaaccgcagggacaggccagctttgctgagacagatacacaggctttatttgtttgcaaagaaacacaactgaactcaactgtaaagacaacaaagctcaaacagcctcagtcctcactagggtttcatgccagcccaaccccatacgtttgtaaagcattacagtaactttggagagtaggactaaagtagtctaggcttgcaacaggcaatgtttatgttcactccaaattgatatgttgaaatcctaacctccaatgcaatggtattacgaaggtgaggtgagggtggtgccctcacaaatggggttactgccctcataaaagagaccctagagagctccttcaccctctttcagccatgtaggacacaataggaagtctgcagtttacaacctgggagaaggcccatgccagcaccctgatcacagactgtcagcctccaatactgtgagaaatttctgttgtttataagcacccagtctgtgatattttgttataccagctcaaatggactaacaccgagctgtagtctcagttctgccactcaggcaagccatttagtttctctgaatactgacttcctcgtttggataagaaggaaaggactcattgttcaattcccacctatgagtgagaacatgcggtgtttggttttctgtccttgtgatagtttgctgagaatgatcgtttccagcttcatccatgtccctacaaaggacatgaacccttggacacaggaagggggacctcacacacaggggcctgttgtggggtggggtaggggggagggatagtattaggagatatacctaatgtaaatgatgagttaatgggtgcagcacaccgacatggcacatgtatacatatgtaacaaacctgcacattgtgcacatgtaccctagaacttaaaatgtaataataataataataataataaagaaagaagggaagaagaaatgggaatttgcttaccagtagttaaaaaaaaaaaaaaggaaaggactacgtggaaacgaatgcgggtggaggaggtactaatatcttctgagcatctcctacaggccaacattgtccttataccatctaacctaatccacatactaattcctgattttacaaaaagggaagccaggccaggggaggaaactgctcagtgtcacaggggacatagtacagataggacttaagccccggtgtctggtttcaaggctatacccaattgctatgctgaccttacacattctgtttccagagttcaaggactaatttgagcatgcctttctcaatgcccctacatatttctatttccatgtgctatgatataatttccgagtcacatctgagatctcaccctctctaaactctctggtctttcccccttactgccaccaccacttaaacccagacaagctctgggaacatagagaacttggagagtcatccgcctctatttccatgtagccggatacatttttgcatcatgtagtttgctcagaacacagcagagattctagtcctgcaagtttggtgccttctaatcacagcaaagagcattctgttgcacaatgaatattagtattcactgataccatatgttcccagtgggcaacagccaatcactttttcaaaacccttgggaggtgagcttacatttacaatgaagaaatgacaattatcatcaaccaaatccaattaattctcagatttctatttttaagtttcttgaattggaggaaaagattgaatatcattaataatggaacttactgtctagtttcattaaaagcttgccacttcacagatgaaatctgaggcaagccaaagagaaatgttggcagtttgtgccttcaggcaacagaggccttttgggtaaaattatgtttttgtgctgagggggactgtcaatagtacttgttctaaaattatatacgtctttatagaaattgcctctacaaaagtgcaatcatattaatacacacacacttgctgttaaggctatcaagttaaatttaagaagcagagctattctctaagtgggacacattcttaacactcctaacaggtaaagaaaatccttcctatacatgatagccaattaatgactattaaaatgcttttaggtgccatggtaggaagtccctgacaggtagctttgagcagaaagatcctctgctccaggcatccctggggctcctgaatgccatttgtccttgaacctgcaggagggaagtgcaaggaggacttggtttcaaatgaaggcaagcctccttgccttcaagttctaccagctactacttctgacattagcttctaagattagaataaaatgggataataaaacagaaaacaaatacgaaataatccatctgaaacatggtttgcctactttaaagggttcctctaaaaccgattcagagggatgactaaccaatatatgaaacactttaaaataaaagctttttggccaggcgcggtggcccatgcctgtaatcccagcactttgggacactgaggtgggcagatcacgaggtcaggagttcgagaccagcctgtccaacatggcgaaaccccgtctctactaaaaatacaaaaattagccggtcgtggtggtgggcatcccagctacttgggaagctgaggcaggagaatcacttaaacccgggaggcggaggttgcagtgagccgagatcgcaccattgcactgcagcctgggcaaaagagcaagactccaactcaaaataataataataataataataaaataaaaaaataataaaaataaaagctttttaaaaaaatttaggatttttaaaacagtttacaaagttgagatactttagcactgtttgtgactgcccaacactggaacattttccagacaaagctctggatcccaggactcagccttcttcagcacagcctgataaggctctcatggggtccccccgcccctgggggtagcctacctgagtcaaaatcctgactcttccccttgttggctgaggccttggacaagtcatttaatctctaagggtccattcttcttctacatggtgacaatcctgactttgaattacttcaaggattaattaaaataatacatgtataacccttggcccaatgcctggcatatactgaaggactcaataataggttgaggctctcatgactgtaataattatgagtagtactaagaaagatagtggaaatagttgcagtgaggccctactctagatggagggcccacttgtgatttgaaacatccagccacagtttaggcaatcatacaggcctatctcctatggcaaatggaatactgccccatcaaatgggttgaactaataccactagactaagtatttgatcactgcttttttacaaggtactaaggtagtactcaaattgctggtttttggaggacacaattatattgcccaatatggacaactcactatgtgagttgtcaccccctcctgagacacatggacagaaaatataatacactggcaagagtccagctttatggccactgcattcagacattaccagattccaagtttttcccatttgaagtagctggtgcagttcatttctttagacatgcctccatccacatcaagtctgaaagcttctttaatgcttttaagattaagataaaacagctggtgaaggggtggaagcgtgtcagtggcaaaaactctaaaaggagaacacagagcttggctaaagacaaagcaacaggaagtcaagcacatgcaccgtccagaaataccctgaaatgttattttaagacttccacccgcgatgcaatctcatcctccatattttaatgcttttgtgatatttgaaggaagggacaggaaaataacaatgatgaataaaattaattctggttaagtaacaactaggcctgagggccaggtgtcccttaaccactgagcacaagaactctgtgattttagatacactcagacagaaaatcatggaaaatatccacccaccgccaattccttcaatggcagaaaacataagacacgaataatcaactttacttaagatttgcaaaccttatgtgtactaagtaaccagtactgtgtctagttgccatggggtgggggagtggggtgggggtctaaaagaattgaacatttcaataaatgttattcaataactaggttatatatgaacattcagtcaaaatatatttgtaagggaggcttcagtttctagaagagaactgagaaatagaaaggcagctgcaaaatttggtgtacactgatgttcatatttaatctaattaatgggtaatacatttctgaaagggtcgatttatttttttagagtcaccctgtaatagcaaatcttagtgactgatgaaacctcataccataaaaagaacaggatagagaaacgtaatacgaagtcgaaatggttaaggctgtcatattgccttcacttcaaaggaattacattcactgttggtatttcttgtagggaaccgagataccattgaagaagccttcaaaaaggctacattacataaagcattaaaacaaaaaagtaatctagtaacaaaaaggcccacaaacagagctgtggggtacaaaattagttcttcataaatttttttttttctttgagaaagagtctcactctgttgcccaggctggagtgcagtggcatgatcttggctcactgcaacctccacctcccaggctcaagcaatcctcccacctcagcctctgagtagcagggaccgtaggcacacatcatgatgcttggctaattttcttttattttttgtagagatgggctttctccatattgcccaggctgacctcgaactccctgtaaatatttcttatagatcagtgaacacaatgccatattttcttacaatgctgcacccgacggcttcatgggcccttctaagaaacgaagaaactgaccagtagacagaacggtgccatatgttttgttatgagatatgggcaaaaggattgctgtcagatgccaggcaatgaaagtaaaggcaggaggaatttccacccttgaagtgaaataaagacattttaaagctacggaggttggtgtgagctattcagaggtcaccaggaccatcagcatgtggactgtgtcacagttaagtctgcaatgtcttcttttccttattagtatataaaatagtagcgtgcccaaaatcagtatcttagtatatgaaatattaatttcttagaaaaaatcaatgcaaacctataagctttaaaggccatttttttttcagctctgacctagatgtagcctaacagccacagcagccttttcccacgccagcagcattcactcctaataacagggatagtggctaagagggggcttcagagccagtccctctaggttaaaattccagctctgccacttactcatggtgtgaccctaaacaagctagttctctctcctgggcttcaatttcttcatctgtgacaaagataacagtacccatctcatagggttgttacaacaattaaatgagacagtattggtagagagctcagaacagtatctcacacagtgagcatcatgtaagtaattgttaaataaaactagcacctagattttggtgtcaaactgttctccagagaaagaagccagggtttcttagagggtagttccatatcttggggcggggaaagttagggattggcaaggctcaacgtgtggctagtaggaagatagaagatgttcatggagctcaggggtagtgatgaaaagacaaatcactagccaagatgggacaatgtgggcatcaaaaatagtaaggccatctaaatgtgaaagacatgatttcatgatatcccacacatgaaaaagttaatataaagcacacaatgaggtgttatcatacaaaagaaaggaagagagtatccattccactttattttaataaatggaagagtgctaggtgttttgtttcttctattaaatatttatccgtttaagtagagaagaatgaacatcaggaacttagtaatactagtcctcggtaagacagagtagaccaataacaggaaggctttaacatacttaaaaaccagggggaaagaaaatcgaagtgtgtcaagatgatgaattcgctaaatgttctaagaggtgtattaaccacagacttcatccctcatatcctaggagataataccccttccatgtcttactaatggagatagtaatagatcatatggtagcttccatatgatgatgcaaagaaccaggcaaagattaggaggacaggacaatggactatgagatgccagccaagcaaaacttggaaaagaaaacattctgggagaagcaccatgcttcaaaaaaactagaacttgtgtggaaagtataactccaaaatcttactgctgtaacaaattgtggacaaatataaaatggagcctagccagatgaccagtggcttggatttgatgaagctagagatggccaaaaataactagatcagttatcagctggtcagactatctttctggctccaataaagtttctgtaattgtggaaatgtactagtactatattactgtagaaaagtctcaaaatgcacattgctctaacactggacactatcaaaatatatgttgctacaaacttaggaaagtaaacagacaagtttaagaacaacaaatgaaccaccatggcattggtattttacaacagctttaagtatgttttatgtttcataatcactggatctttgtgtgctgtttccagtgtcagggggctcaaaagaatcaacattgcagtttaagttgttaaaagagttaagtcggtaatccatgttcaaacagatttcagaaattaattttcaaagtttgattttagatacaaatttaatagtttgagcgctaaattacaaatagtagcaggtgcttctctctatgaacaaaaacccctagaatattaaagaatacataaagtgggtcaccaacatgatgtccagaggagtaaactgtatttctccacataaaagactattcagaagcacagttatccacttcttccatcaccatgaccccaagggaaacaaaaggtagaggcaacaatagaagaagatatgagataaaaatgctacacagttgataagagttcttccgtattaaaagtaggacagggggataatgggaaatgaactacaatagaacctggcttcagtttgttgtataaatccaatcagacatgtatagcgtaacaacacgttccttctgttatagctttgaaataaaatgaatctgaaatgatgaagaatataaatgtgtctagaacaatgaaatacaatggtgaagtttcagatgtggagaggggtgaaaatggagctgagaaatactctcaagattccactgacccatttcccctacagggattaaatcaaacaagatcgatcacctccaaatctttgggtttatacctgacaactactctcctggcaaatttaatgtttttctttttgaaaggctgatattattatttctacaattctttctccctgttcttcccaccctccatctaagacatgcaatctaaatgctcactcatgggagaaaggcaacaaagcaaatggcactcactgagcaccagcatgtgccaggcactgcagagggagattcccatgatcattacatttcatcatcacgagtcttgggagctggatattattaccctacttttagtaatggagaaaatggagttctgcagaaatgagcaaattgcacaaggacatcagtgcagtttgagtgttcagacctgtgttcaggtttgccaccaaaccctgcaggctcttccactgtcccatgctgcctttgggttctctgccccactctttttactgggactacctgtcagcggttctttctcaaatgaattgccaagtcaaaaacctcaactctgaaactcagttcccaaaaaagcaacataaaaatgttctagtctaagtctcctttgtttatccagtaagtacttgttacacagaaggctgtatcattccagcctgaatctcaatagtgctctgtgtgacctggagaatttaaacgtgtacctgtaccaaaaagaggaactcatcctaagttttctactagtcacacacgtgtgacaagctctccataccagcctgcacttcagtttcagatctggaaaaaggtgcctaacaaccaatgcagctcccagaggctgacagaaagagtacccttctccccctcatggctgtccttgtaatgctctctctacattcagaacagagtgtaaaggctttaaaaccagcctctgaagctatcagggcaacatcaattaagataatttttaaaagctcaaggcagaaaagaaattaacattccctttattttaaaatgtagtacacaagattaaaaagtattgacgatgagtacaggacaatctccttattgacttgtttacaatcaaaatcgtgcatgcatgacaggtcattagaaattgagttttgcagctgggtgcggtggctcatgcctataatcccagcactttgggaagccgagggtgggcggatcacctgaggccaggagttcgagaccagccatggtgaaaccccatctctactaaaagtacaaaaattagctaggcgtgatggtgggcgcctgtaatcccagctacttaggaggctgaggcaggagaatcgcttgaaccctggagatggaggttgcagtgagctgaggtcatgccactgcactccagcctgggtgacaagagcgagactccgtctcaaaaaaaaaaaaaaaaaagaaagaaagaaagaaattgagttttgctcatttttattttatttttaaaatcctacccaaggaaagcatatttttactaaccaaaagttatttactatctgcactctgaatgttatgcaagtggagaaaactaaccaagaatggcacataaggttgagtagaagtccacggcacaaatatgctggctgaggggccaaagtgtggtttgtatcatagtaggggctgcaaccacccgaaggaatggactcctcttaagtgccaagtttatgctatggcaaggaataaatgggtaacaaaagagatgcagaccacaccccgaaggagcctccagtagagtgggtagatattaaacaaataattacaaattactatggaccacgttttctcaactctaagaaaaacattttcccttatctatttaatcctcacatgcatcttatcagttatgactaatccctggcttacagatgagaaaactggcattaactatctgcttaaaggggtggatttgggattggaacttgggccaatggactctggagaccattcctttaaggacaacactacaccagttcccaccagtcccccaccccaccctatcccctgggcttcttaagtattagaaaatggaaccactattcacccagtttctcaggctgaaaatccggaattatctttgactcctctttttctcactcagttcaccaatcaatcctgtcatctttcctttcaaactatatccagaatcctactgcattttattccttccactactatcatcctggcccaaactgacatcatcttatacccggagtaatgcaaaagctttcaactgcttttcctgcttttgcccctgctagctacaatttacctcccacatggtggccaaagccatcgttctaaaacaatttcccatgttcctctgcgcaaaatctcccactgaccttccatctcagcagccactggcctcagccatctaatctcctctggaccctcatttcctatctccctctcctttgttcccttctccccagccaccctcacctccctgctggtcctcaaacacaacaagcatatcccaatcttggtgtccttgcacatctgatttctgctggccagcacactcttaagcccccatctgttgatgtatgtcactctctgatttcactcaggtcaacaactaacctccctagagggctcttctctgacactctctgtgaaggagcatggccctcttttttgtctgtctcattctttggactcttccctgcacttacaggtagctgtcatcacactacatatttatttgcaaattatctgcttcacccactagaatagaggctgtctgtgggcagagactgctttgctcaccatttccccagcacttaaaacatcaccttcgcacgtggcagtgaacaaaagaatgcgtctcaaagtattattaaagcaagtcagtagtgtgtattataatgaataccattgtggaattgaagaatgacataattataataccaactattgtgctgaagattacggaggttttaataacattaattgcagagaggtggtaatttatcctggggttcagaaatggcctcgaggaagggctattgaagttgaaacctgaggctaagcaggagttaaccaggtagagtggtggggaggccattctccacagatgaaccagtatgcacgaaaagcctggagtggagaagaaacatgacagcaggttggagaaaatgcaaaagaatgagtgtggatggagcacaggagagaggggaggatggaagggaatcagaaagagacaagaccatacgaggtgctgtgggccacattatcaaattgtgattaagtgaatacattgggatgcttatgtctatttatattaatcagtttaagatgtgcctattcatattcttttgtagttcaggaaaagtttgaataacctaaagattatcagtccctcaaaagaacttttcagtaacataaccaggggcaggtattggcaggagggcattcaaagagagaaagatactaattctttggacattttctctatttctttttttttaatgaagcaatatatttaagtcaattgtataaaaataatttagcacattggattcagaaatctgatgcctgtgatgacaatttttagagaaaattccttttatgtctatatccttttgacttatggcactttatccaggctaacacaccatgactgagagaattagctgacgaaggaagggcttagcagttgcttagcgatatctcttgataagaaaaacggtcaccacctcctgcctgtcccatgcattaacaactgttatctccctctagcaatactcattttatctgaagaatcagaccaagccattggagcaccagccagcaaatctgaggtatacaaagcagctgcccgcaaggaagcttactctagttcagaatacaaagtactcacaggtgaactgttaaataataatggaaggtttaaataaagatccatgataaaaactaaaaaaattatgtaaatatttgagcacctacaatgtggcaggctccgcaaactgggaacaaaaacaagagaatgtgggacagaaaatctccagtggccatgaaatctcaccaccactacctacttcccaaggcctagaaagcaaatcagctaaaaacctgaaaagctagaagtaatgtaaattactggtattcttcagggggtctaatgatatctgtatcagatatgtggtccctacacggcactccaaagtctgagtggggctagcaaaaattgagcagagtggcactgtgatcatcagaaagatatttcccccaacaatatgacaagatctgaaattatacgagtttgtcaaatttttaaaccctacgatgtaaaagttctccttaatgtcccaaaaggcaatttttactttaacacatttttaaattaaaggtagagctcaaaactgttagtttttcttgcatatcagatttccaagaaatatgtttgttatcttgtacaattcatttactgaccttaattacctaaatgtacgagtcagcattacctgacaagtccgtttggagatcttacagtgtgtgagggcacccatcctccagtccccagctcctcttgagcctcatctttcaaccccagcatttacttatttctgagtctttgcacatcagtttctactttcagagaatgggttggctgattcctgctaatcactcatccttcaggtcctagctttgcctgtgcactctgcaagggcaggcaccacgctttccctctactgcatgcccatcatctactccatcacctgtcacaaagtaggacagatgtctaacaaattttgtttgaagaaatgaaccactgtcatctccccaagaaaacttcccccaaaccagaacactggttggttagccctctcatcctgtccctcacacatgtgtactccaatgacaccccttatcgcctgatccttaggttgcttatctcctttgctagatttaattctcaaagcctcaggtcttgtcttggttcttgttaaatcccagagtcttcacaacagttggcaacatttgctgatattccttattaaatctttgaggaactcacctgtttccccctttcaattaaaaaagaaaaagatggcatccatttcacaatactcttgagcctacaacgcaaaaaagtggtgattatatgaaaggactctaattagaaattcagataacatagtgaaaaactacttatgaagctaacaacattcatttagcagaaaaaattatttcttcacagtcccaacttactgcctaggacagtaaaatctagaaccaccttcattccccaaacaaccattaactttacttttctaagtactgataaaacttgcgggctacattatggtggcagtaacagatgtttatttttcattcactctacgcgtccatttcaggttggctccgtgtctcttctctcaggaaggacagggcttccacaatctggagggtcaccccttgctgaggcagaaggaataggaggggaagagcagtgtgcccaggaggaggagacttgaagttgagaattggtgagcagcatcttaatggccatcacacgagatttggcagaaatgtacagaatgtacaagagtagttaaccttctactatgatatcccagaaggtaagtctgaatcaatatacagactcaatctgttttttgtttttcaaagctaataagacaaacgcaggtattaactcactacagggcaattaaccaaaaaaagaatccaccacaatgtaattggacaagggaacatatccatactcccagagtacctacaagagaattttattaacagactgacgtagctctagaaactaaaagcagatttgttccccagctgttcctaggtattgacacagtgaagcctcagcattatccaactgcttccacctggcactgtcaaaaaccattagtttgtagatgattccacaggcacggagtatccaccatgtcctttacggctactataatttatactcacattttgaacaaatataaatgcaggctcatgcaaagcatatggtatgggcaggcagagtgaaggaaagatcacagcagaagggaccccatggagagcttaagggagaagcaaggctataggtaaattcttcaagttccaaagaaagtgatatggataaaattgttaatgaagatggggaagaaagggaggaaatgttctagaaagcttggggaacatcagtatttaagggagatttgagaagaaaagggaatgtggtgagaaaactagaaaaagaacctgaaggagtccccagaagttacaggataaaagacttcgtggactagagagtgagcagcgacaattactgttgcggtgaggatgtggaagatgcgcacattttcaaagtgaccatctgcacctagaaggtcactacaggtgagcgttttcctaagtagcactgaagtggaagcaatgcatggagagcaccccacagtttcccaggcgcatcctactctgcccttccatgcacccacactcgctttcctttccagctctccactgtctggctggctgctttatggttcagctcctgactcatgtcctggggaagccttcctacagtggcttgttcggctggatgggactcctgctagacaacttcaggaaaagaggtttgtcttgtctttgtgtacttggcacccagacaagtttttgacaaagtaagcattcaatatactggttttttggggggttcttttttggtgggacagagcctcactcagttgtccaggctggcgtgcagtggtttaatctcggctcactgcaacctccgcctcccgggttcaagcgattctcctgccccagcctcctgagtagctgggattatacgcatgcgccaccatgcctggctaactttgtatttttagtagagatgggattttaccatgttggccaggctggtctcgaacttctgacctcaagtgacccgctggcctcagcctcccaaagtgctgggattacaggcgtgagcaaccatgcctggcccaatatacatttctataaggaaggaaataaaggagtgctgtagtttggtttgtccccaccaagtctcaggttgaaatctgatccccaatgttgaaattggagcctagtgggaggtgtttgggtcacggagtcaaatctctcaagaatggcttggtgcatcttcatggcaatgagtgagttctgactctattagttcctgagagctggttgttataaggagcttggcacctcctttcctctcttgccatgtgacctctgcacatgctggctgtcctttgccttcaaccatgagtggaagcagccagaggctttcgccagatgcccaatcttccagccagaagaatcatgagccaaataaatgttttttctttagaaattacctagcctttggtattcctttacagcaacacaaactaagacaaggaggggaagattttcttaaaaagggagcaatagtacacacagtaacttgaaggggtgatgcagcctggaaaaggaagtgtgttgttttacccaatagcaatgacttagcacatctgtgggagagggaaggtgatggagggttaaagacacaggacgctaggacaacaaatgaaagaaatggaagacacaagcgtgctgtgtggagtgttaacatttagccttctccattatcattcaagaggaagacaatactggaaggtcttccaatgacaattatatgcatcagcctagaagtgacacttcatttatgctcaaatatactggccagaacgagtcacatggactcatctacctacaaagggagcagagaagtgtaagcctcccatgtgcccacacggagaaagaagggtatgcgctagatgtcgctaacatctctcttccttattcccaaacagtcccacaatctattagctttactatctagaaagcctccaacaaggcctcttctccaactcaccattgtacttcacccttcatctgtttcactcccatatctgctacttttcccaaacataaacctcatgtcattcccaatacttgcttactaaaaaaaattctttgtggctgctcactgcttatgatgtaaataaagttccttttgatgacatacaagggcgttcacaatcttatgcaaacctacctcttgagccctgtccctgcctctatgcagtttttgttttttgttgttgttgttaagagttagtgccttctggactcttacttggatgatttttaactgcaatgagttagaaatctcaggacaaaagaaacttggcttagggtttcagtggctctttatttcttggcatatgtggtgagtgcctgcagcgcctgcagccctctgcctcacgcgcgaccttcaggagttctgctgtctgctccagcactggctctgctccctgcgtggttcaatcaggaatggttggagggctttgggcacagctgcagcagagtttgtgcaggaaacgtccaggtgatcaaaccagcaaatgagggattattaccttttctgtagcaaaaattgtggtccttagtgaattcacctgggacctccatccatgacaaatcccaggttttacctgagaaggaaagtccctcccacttccccttcaatcctggatacattgcatacaggcgtacccaagagcagcccagcaagagtcctaaatacagaggcatcattcagacatgattgaagggaatcaccaatcctacagagaggttccagaggacatgcctggcagacctaaagagcagtcaaatgttaccagcacccactctttctgtaagaaggaagaaccattgtatgtctagtgtcaggtggttcaggctccacgtggggattctgacaggcctacaaatagtcacaaaagatttttctaattcccagaaatagccgctttcaaaccgtcatgaccttcctcatgctgctgtctccctcatgtgcctcctctacacaaaacctgttcttccagggttcgaacagtcagtcagctttgctcaccccttcccattttctccaaacttagaattaaccagcctgtgcccatttgctgggttcccagcacatgtgatcaatgccttcatcacagtagcttattatattatagttatacacacaatgtctcccctgctaacttgtgagccccttgaaaatagaaaatatattttttaaccttcagagccttccttacactccatgaggaggtttaataaatgttagctgactgaaaactgagttaactgaatggttttctgtcaaccgagctgaaatagtcttaagttttacttgtaactaatatggcttgctaaatatgggcattgttgatcatacatcatcttctttaataaacaatcttaactatcaaaccatttaataacataacacaatctaaacatcttctgttttggtatctgtctcataatatagtctgaaaagtgtgaatgttaggtagagatggttcatctttaagtctataagtacctaaccaatgatatttactgaatagaataaactatttagattcctaacagagctgcaaaactggctttactgatgaggtaaatcactgctttgagatatagtaaaaataaatatatctcaggaaaagatatgtacttaagtgcaaacaccaagagtatttttttttttggtgacaaaaaaattacttgagcatactgttttaaatgaattgtacttaaatcagaagaactctactatagaaatggatgctgaagcagttctggtataaatggagttactgaaaagtaataaatcaatccttgaagaatattcaaaagcacattagggaggaagctgatgtaggcagagtcccagtcattcatccttagccacttaaccctgatgaccttcaaggagctattgatgctagctgtcggtcgcttaacatctgaaatgaacagaccactagttaccctctacttaaaaaaaaaaaaaaaaggtagcatgtgaaagttcaacttacaaagaaccaatactgattaacagtaccattctgaacattatgaaaatgtcttgcactgacataggtcacaaagcaagcttcctggtgcttttaaaatataatttgacttatgtgaattttcaaaaccaaacctcaagcaagcctctgcgtcctttactcaggtcagagatgctgagagcagtacagtgacacgtggctgcagggccacgtataagtacaaagtattgattaaaattacatcaagtgcagctgctttctgcggcaatttaacggccaaagtgggagaacattagctctgtgccaagtggcagcacaattctgacagccatgtagatgtcctcaggtcacccacctacagacaacttggggctaaatgaaaaggctgaaatcagatctagttgtgatcttcatttctttttttcctggaagggtcagtaagagctttcaattttacattttttcaacttttagtcgaccctaattagatatctacataccttacaaattataatttggctgtaacagaaccatgtctcaaaatggacattccaaagtggaaggaaaagcttgtcatcaccaccatgattttgtttgcttcactgataagattttgaagcatatcccccttccaggcaaatatttcaaatcatcctttctggacaatatagtaacatatcacattactttaaaagaattaggggagaaaagcctaaacatttagtctcttttaattcaggataggctactgaagtttatttttattttttgatttttttttctggagacgatattataacctgtgcttggtgctcattcttcatgctgtaaagggtggggagagcaggatactgtcctctaagcaaggggattagtttccactacaccatacttggtttttcgtgctgttagatttagacatttgtttcataaaatcaaatgtaactagattttcaattcacttccactttttgttaaaatgcatattcagagattttaagataaagcagacaaggcagatgaaaaaatgttaatttgtaatgtatacaaatatcccactgaaaagtcagtagaaattaagaagtacccaacttctcttatgacacttactcccacagcactgtacagctgggaagggctaagtcgatgacctaactttatgaatatgcaaactgaggatttaaaaagtgaggctgcttgctgaagccacagactggctagggaaagagccaagactacctcaagctgccccttcaagttattgatcatggtgccaccccagcaccatgctactcctctgtcatgctgtgcatgggttctcaatttttcattaacttattttcccaagaagagtgtgagcctcccaaggttaaaacctctgtatcttttgcctcttaagacatgtgaagcatacagtaaatgcatgatggtaccaaaataggggcaattgaaacctaaatattaaggtgaagcaataatgctttttaatcagtatgtccagctcaccaaaacactactttggtaaagtacattaaagtatatagctaacacttcccaaaacaattttcaatctaaacattgatcttttctaactattaaataatgtcacaagaaatattaggaaagtccattttgagtatttttcccagaaaaatgtcacttttcaaattatagcttagcaaagatttacctacaaggaggttcatcccaggactgctttcaatagtaaaaacttggctaacatcaaggaaaaaaaatgtgtgttacaaccataaatagaatacaatgcagctattaaaaatgatagagtaaaatatttgtttacatgggaagacagtgactccatttgaagtgaaaaaactcatcagtatgtagaattatcgcagttggaaaatagatatgtactaataggtgcacacaaattatcaatcgaagctaattacaggtgatagaatatatggatagtttatgttctaagttcctgactaaccaatgccttcctccactttgacaggttagtaaacatctaaagataatttgaagttcttctcatccacagtcagtggagatagaaatttttacaagagaaacttttgccaaagggtcaaactctgctagaaaaataatagtctcagcatgagtttaattaaacttgcagctgacatgcattgtgcctctcgggcaacttgtagcactttggaaagcaagaaaataaaactattaaaagactgtttttcaacaagaaagaggacatcagggacgttaaaatagtgttcctgaggaaggtgctacacttctgaaacccaaacaaaatgatcttgacactcatctgagtatagtttgttggtaactcaggtgataaaaaatccaaacctgtgagcagagagtcctagcctgtggtccaggctccttgaagacctggaaaggtagaaataggagatctaacctgttttaaatgttgcggggtgggggctgggggagaagctaatgactaacattgtgggcaagaagtactcaaggttaacaaaggttaatcctttgcttttggctgaaatgttatcagttcaatatgattttcactacaccttcatgattaggagatatgatgtatctggttaattttttttaatagaagtaatttaatgcttatttaatacagcttgctggacaaaatttttcacaaggaattcatccaagaaaatgaaataataaaagggctcatgatgttgagaaggttgggaaccaggacttgaggaatttacagcacaagtcctcatggagcccagaaccagatacaaatcacatctggtggtccctctgaggatggcaaggcaggtggcaaggcttcaggtggtgtgcaaggggcaaaagggcagcgtggccaggtagtctctgtcagcactaaactgatgacaggggaatggggagaagaggacaggcagggcttcaagtatggggcccatgtgattcccagctgaacaccaagattaaaaaaaaatacataaataaacaccagctgctgtagtcagagttgccaattcttctcttcttcccatttgctgctgcactgagtcaccagcccagttctggacacctggttctaacaacagagcagcatggtcctctgtggcatagcctcattgttaataatcacagggagaattgccaagagggcatctaatcgcactctttggctccactccaaaccataccttatggggaaacactgtcctaaaaggctgataaaattactgtttgtcccaaatgtatcttttagagtccatcctcctcggttacttatttacaacaaaatattatagctatttcctcttttatgttacaaaaaatcctctttttaaaattgcttttttttgttgttgagacagggtctcactctgtcacccaagctggagtgtggtagtgtgatcacagctcactgcagccttgacctgcctagttcaggtgatcctcccacctcagcctcccaagtagctggtaccacaggtgcacctgaatgaggtttttttttttttttttgtggagactgggtcttgctatgttgctcaggctggtcttgaactcctaatctcaagtgatccacctgcattggcctcccaaagtgctgggattataggcatgagccatggcacccggcatcaaaaaaaaaaaaaagaaagaaaaaattcttaatagtcccttctttattaatgtcagtttggtttcccattcctgctttcactggcaccctcttataggctattcatagtcactgtaccttacaatttgcttcctactgaacatttacactccatcttttatttttactgactgcgtgtaacataatttgtcaacattcaccttttcaaaaaggcatataatgactattagtacaccatagcagaccacttaaatatagaaactcaataatctatagcatttttatgtaattaattaatttatttatttatttatgtattgagacagagtctcactctgtcgcccaggctggagtggagtagagtgatcctgattcactgcaacctccacttcccgggttcaagcaattctcctgcctcagcctcccaagtagctgggattacaggcacctgctaccacacccagctagtttttgtatttttagtagagatggggttttgccatgttggccaggctggtctcaaactcctgatctcaggtgatccacccgcccgcctcggcctcccaaagtcctaggattacaggcatgagccaccacgcccgttcatattttcattttaaaaaaaatcaatttatcacaagatttttttccttcctatacttatacaaaaaagatcacagggtaaagatgcaccattttttaatagcttaaatgtctatttatcaactccctgaaagtacagtagagcacacaagccactttggtcctctcagctgggcaagtaattgatctgtctgcccacatccctgggatgattaattacaccatgcatccagcaaggctccattaggcctggcttgtgcaagccagcaatgtagatgcacacactcaagatggccaccgcaagagaccatgctgccaaagacaaaggtataaatgctacactgaatgctgtcacactttttggccccaaagttcactaacttgaaagattcccattaaaacttgactctgaagcaagtgtggtggtgcccactcacaattccctgctgcctgggaggttcaggtgggaagatcacttgagcccatagggtgatatgattgtgcctgtgaacagctattgcactccagccagggcaacacagtgagacgccatctctaagacaaacaagcaaacaaaaaacttgactctgcttaagtaaaacttaggtaaaaaaatctcccaaattaaattttacaggggactcacataaaacctcacttacgatttaagccccattattcagaattcctaagtacatttccttacttctaagtagctactgatgttaaaacacatgctgtatttattaactttagaaaaaagaaacatcactacataaaatgtacagattggtttttaagacatacaggctttccaaaaacattaaaatattttaaaatagcagttgtagtccaaaaatatagtaattttgacaaggtttggactgttatacttaggaacgcacatatagtaaggaagtataattttaagagactactatactcaatagaactattttaaagtactgttaaatgtatccttttatacaaaacttgatgtgccaacatgcctttattccatgtaaagcctcttgaaaattagtttcctttgagttaataaaatgcatttaattcccttatgtggcattttgtttatggggataggatgtctttttttttttaataatttcacacaatgaatggtcaggtttaataattcagtgatggtcaccagggtcatgggacagcctgcgattctaaagtaacttgatttctctctggggttcattttcctcttttattgaatatagataacagatgcttacctttaagcattagaccagggccttaataatcatccagagctacagagatgtaagttggtgttctcttattctttctcctaaatatgagagcataaagtccacagaaagaaaatacagctaggcagttaaattttacagccgtttagagaaaactgagtcagaaatagtataacaaaggaagcactatggattcatgtttcagaggacccagctggtctgaccacaccagaaaaagagcagctgagcgggtactctgctttccctaagctgttagtggacaatctctacttcagaagtatggaaaacacagtgatgtcttgattcatcatgagcacttttcaggtaacacattctgaagtctattgaaagagtactcttcagggagcattcctgcctggccaccagctgaaaagaggagtgattcaagttttaggcagatttcctaatttaattaaatgggagcatagcaaagagatactttccagtttgaccccatgtgaagctcaactatgtggatgctaagttatgggaagcttatcaactgagtgagcatttgcaggggccaatgttataaaactgaagtctgaggtggccccttccatgcacaaggacccaattgctgctgtttttctcaactgaggatgtcaaagtcactcaaacttatttttttatttttctatggaaaagaacttaaaagcataaattaaggccactgcactaaaggaaaaacaagcttagagataactcaagaatggactgatggatggacacagaaatgggtacacacacagataaatgataaagcaaatctaacaaaatgtgaattacagaatctagatggcagtcatatgggtgttaagtctacactggtttcaacttttctgcacatttgaaaatttttttttctttttttgttttttctttaacaagacaaagtctccctcttggcccccaggctggagtgcaatggcgcgatctcggctcactgcaacctctgcctcccgggttcaagcgattctcctgcctcagcctctcgagtagctgggattacaggtgtgtaccaccaagtctggctaatttttgtattttaagtagtgacgaggtttcaccacatcggccaagctggtctcgagctcctgacctcaggtgattcgcccacctcggtctcccaaagtgctgggattactggcatgagccactgagcctggccgaaaattttcatagtaaaatgctgggggagaaaataattccgagttataatcaaaataaaggaggcagcaggccccactgtgaaaaacctcagccctgagggcaagacacttggttcctggcccaaccccaggaactcacagagtttagaaccccaaagggcattggcaatcctctagggcaggttaaatacatggttttatgagtccatgaaaatttagaaaaatagaaacaatattttcataaaactatttgatttaaaaactgttgttttgctgaggttatatgcctctatgcttctggttttaaaaatcctttatttcatgaaacactggtgatggtagatgacagatttgattatgtccacacttgacaaaataaagttaataacctcatgtcagtcttctcaatatttctgaaatgataaaaggttacagaataaaataaaaattctgagaactaccaatgcagttcaatgaccccattttgtaagacgaaactgaggcccagagtggggggggcagtagccaactcgacaactgtaggcagttcaccaactcaaagggttaaaaaggtgactcacttaatcataggtgggatgcctatccaaggaacaaatcccaggttacacatacagggatggaagcctcttgtaagaatcacccacatggctgacttttcagtgctgccactggtcttctgaacataatctctgtcagctcagcatttagatcaaatttcttacagaaaccagtttctgaattttgatgttagtccttcagccatgcttgcacaaacataggtgaacagtgacataatccaagtgcataaggagatgcgaatttactacattcgagactatcatccactggtcttattttttctaagcttttctcatagccaaatggccggcacagaattttatgtagaatattgtgaaaaaacagaatacattttctttgtaagctaatattcagggaaacccgagatgacatttgataacaatacaagtagcagactacaaaacgtgagatttcaactgattgaagaaatgcaattagccgggtgtggtggctcacgcctgcactcccagcgctttgggaggcaaaggcaggtggatcacttgagcccaggagttcgagaccagcctagccaacatggcaaaaccccatctctaccaaaaatacaaaaaattagccaggtgtggtggcgcatgcctgtggtcgcagctactagggaggcagaggcacaggaatcgcttgaacccaggaggcagaggctgcgttgaacctggatcacaccactgcactccagcctgagcgacagagcaagattcgactctgtctcaaaaaaaggaaatgcactcaataaacctgcatttaaactacaaaaataatataaatagatgaatatcaaattaaaaccatgtctaataaagggaaaaaggtaaatatcttagactaattaaaaaaggggaaactatagaagttgaacttttgttttataaaataaacatccattcaccaaatatgtctgtcattaccctacctgcctagacaaatgagatgagcaaaagaaataaaataacagggagcaggtggggtacagtgactcacacctgcaatcccagcattttgggaggccaaggtgggtgcattacttgaggccaggagttcaagaccagcctgggcaacatgaggaaactcgtccctactaaaaatacaaaaattagccaggcgtggtggcatgtgcctgtagtcatagctactcgggaggctgaggcatgagaattgctggaactggggaggcaggtgttgtagtgagccaagattgtgccactgcacttcaacctgggtgacagagcgagactatctcaaaaaaacaaacaaatgaacaaacaacaatgagcagagctctggtgtgtcatgctagccaggtttatacccctgtggctgaagagctacatcatcttatattaacatgtaatactcatttattggtacaaaccttcaagccatatagccatatttagttccaaagctggcctgagtctttatcccttctatggcatttttggggcagttttgaattcctagcctagacagctccccaaggtctgcaaggcagggcagcaggcacattcagacacaaacactatttgcctgttgacacatttgtctatttggtcatttcatctgtcttctaatatgtgcctgaaacaaataaggtactcaaatatttgttgactgagttatctatagtagtagaatcttcgaaactatctgcccagccctaactaccaccacctcctttttaaagaactgcccattttcaggggtgggtcctggcagccataatcacctgtggagaaggtggacatctgagacaaactgaacctattggagtctctctcccaaaaattcaaaattggaattgaagccacagttgatgtggtctggttgcttgttggtggcatggagaagtcacccgtgccctggtgaaagactgaaagaatggccactttgttgctgaatagctttctagttcagggttccagtcccttgtaaaatccaagttattcctatacttgggttctataagacagttggtatctaatcaccatttccttccccccaccaccccaaagttagctcaaaggcatttctatgagttgcaaccaagggcagtaagtagctaaaaggagtaggatggttattctagtactttacatgttctaagcctgatatgaaatagaagccatagaggagattaggtatgaccacccaaatattaaattttgcattgcaaagaaaaaaaatgaagttaaaaaatgaacatgttagaaaaaatatcacaacataataggccaagggtgaacagccttaaaatataaagagctcttataaatatgaaacattatctcaacagaaaaatgaatataaacaggaaaaccgtaaaaagatctctaaatgggtcaggtgcggtggctcactcctgtaatcccagcactttgggaggccgaggtgggcggatcacctgaggttgggagcttgagaccagcctgaccaacatggagaaaccccatctgtactaaaaatacaaaattagccaggcatggtggcgcatgcctgtaatcccagctactcaggaggcagaggcaggagaactgcttgcacccgggaggcggaggttgcagtgagccaagattgtgccattgcactccagcctgcaggacagagcaagactctgtctcaaaaaacaacaacaacaacaaaaagatatttaaatggctaataaatatctataacatataagtatatacatctgtttattcattttcttcaataatcaaacagattacaatgaagtatatttcatctatcagatcactgacaaatattaaaggcttaatactaaagtggtagacactgctggctgcagtgtgaattgatacaaccaatctgatatgtatcacagttgtgaatgtgcatagcttctaaccaagctttccatgtctagaaattaatcataaggaaacaactgaatgagctgaagaaaacatatgaagatattcactaaaagcctaaaagtaaatctaaatgttcaatgggagattcatgaatgggaagcccttcaatggaatattaggcagtcgacatataagaatatatgttggaggccgggtgcggtggctcacgcctgtcatccctacattttgggaggctgaggcaggtggatcacctgaggtcaggagtttaagaccagtgtggccaacatgaggaaacctcatctctactaaaaatacaaaaaaattacctgggtgtggtggtgggcgcctgtaatcccagcttctcaggaggctgaggcaggagaatcacttgaacccaggaggcagaggttgcagtaagccgagatcgtaccactgcactccagcctgggcaacaagagcgaaactccgtctcaaaaaaaaaaaaagaaaagaaaaagaaaaaagaaaataatatacgttgaagaggggaccattttatattcttaagtgaaggagacatgttataagacatgtaaacatatgatcagcttttattttttttaaaaaaatacctatataaaaaatctgagagaccaaatctaaaatactaacagtggctaatgaattaacaaacatttttcactctgttcttcatatcttttactagtctatattatctgaatttcctataatgagtatctcatggttaaaaatgttttaagtatttcattagacacagtgaaaaaccaccaaaggtaggcgttccacagaactggatatgaatccaagatctgccacttaaaaagctttgttactttgaacaaataacttacctacgttgcattcatctcattaaatccttatacataaagtgcttaatagagaacctacacacaggactagctcaacaaatgactattgcatttagcaatttttaatgcctctaataaagtataaatagggataatcctatcactatatggtatatgggagatgggccaaacaaatcaaatgctataccgttcttaagctaataatttgcaaagtatctactgtagtaccaaactggaaagctagtgaaaaccacttatctaaaaaaacaacttgggaaaggctcctcaactctttgccataacattatgttgtataattaggttcaatcctgcatcttttgcaccataattaagggcatctgctctccttacatggtcagtaggaaacacagtcaattatggagggtcacagaagtaatgcagataagtcagaatgaaaatcacagttaaataactgcagtcccacctactctctcccccttctcccccatctgcaaggatgacaaagattctctcctccaccaaacttgagtcaggcctctcttctctactaagtcacaacgttggcgccaatcctgttccttaagcaagaatcctgttaagtcaggttagcaagaatcccccaaacttgatacctgctcaagttcctcattccccacctttgatgttacaagtctttggtctgctttcagcaagaatcctgctaggtcagttgagtttggtttaatgtccccgctgagtaactttccattccactgacccctcacactctactctttgcctacaagtaccagctgtcaacgtggtattgagctgggttgttttcctatattgcaacagacttgagtaaagtcttccccagcattgtaacaagtgtcagaataattttttttctctaacagcagggaaggtcttgggccttcaggtacaaagctaatcataagctggttggaaaaaacaagtttgcttccctaatgtgacttaaaggctccaaatactgagatttaaaattacccagaagcattaagacattaaaatcaaaacaaaactcctggtgctggtccctttgaaccttaatagtctatttcattttaatttaatttcaaagaaagtacaaaaggggaaagattatgctataaaattttcttgaggataatgactatgtcttattatattatgaatccagcatgggaccaatgctggacacatagtaggagtgcaatgatttcatcaattgagagaaataatggaagcagatgaatgattatttcctgaaaaatgatagcaaaaattcaaggggacaagctaactaatcctccctttaaattaggcaaatcacagaactataaaggcaccagagtttatttctaccaaacattgagaattaaaaataactcttgaacattaatgtatttttagacaacaattccagtatgcagttttacattttcaactagtactgctgtaaccttaattgaaagcactgtatagtggggtcatagcagagatgcggatgtctacctaaactgggactgaaacatatagtaaacacccccctgcatggttaaaccctttgcctgaagcatcaccagtccttgaaagaagctgatgcattttcctaagaaaagagacatccccaggagctccacctaagggggatgatttctttataatgctatatctgaaatatgaaggaacgcttagctgtctgctttaaaataggaaattaataccttttgcaagtcaccagaaaggtagctgaaatagctcaggctactctggacttgtaactcatctgcagataccctcacccactcctttttatccttacataagagtagagaacctcaagtttcttcagttgcaaaagtcaaacaggaagtttccaagcaggagttctgcaaagaggtatcagtcagtaagaggggcaggtatgccaggaaaagttagaagggaaaaagaaaggccaggggatttccgagctttggggcaagaaagaaatagcggtttttgtgtcttcaccaccacccagccaactaatgccatttattggtaataagcaattagtgccaatgaccaaggagacagacagcctgcagagtccaaaacaaatccaaatacctgtaggcagctggctggatttaaataaggttattccatcaaaaatttcataattttcaactctgtgagacatacacttatatgatatacatttaacagacactctcaaagtagcttttgtttctacttatgtccaggggtacttttataagaaataggaaaaaaaatttatagttatagctataaccgaagtaaaattagctatacttaatgtattctttctgtacaagtaaacaaatgtatcactgataaaaacctgaatatgatgcattaacatacacaatattgttgctcaaaaccacaacacattctttggcattccctacgtctgtagtttcaggcacaaattccatgcctgctggcatctctaagaccaactgtttcatcaacaggataaaaatcgggcaaacaggtaaaaaaagaaaaaaagccaaaatgggttcccaacccattataaaaatgaaccaacctccacttgggtggtatttgagagaaaggaagtagctgccgcctggtctctgggtcagactgttgctccccaagggctttatcaaatgagcaaaccaaacaggctcagccactgatttcaaagccaaacttaaaacttgctaatgcatgtttttagaaagattttagcttagtagatgttatctataactacaatgctttacagagctttacaaccttgcaaataccccttagccaagtggctaaacttttcagctgtaataggaagcttttcaagagctgggaaattccatctaggacaatgccaatgaatactgaaatgaacgaaaatcttcagtttctgcaacctcaagtctagcagggattgcttacggctaattctctagttctatagcctatagagtctctcttcttgaaagggattaacagtaagtggcaaaagattagaccatttctccttaatttttctaccatctcaaagggtcagtcatcaacattaactcattgaccaaaagatgtcaatttttcctcccaaggaaggcttggaacgtgactcactttctagagaggtaaacagatcacttctgattcaggcattagctccttagtacagttcttatcaccacaatttgagcaatcttcctacctattcaacccctctcaggtaccttctagtacaaagagaacagaatttcttctcccagtaaatcctgtaggaaagggcagcattactggtggcagcttctgatcacagccacagtccctacttgtctttctctttccttccctatttcagccattttgatcattcaggatgcatttttgcaggaagataaactaacagttcaagatataaggaagcggtacagtatattatctgacagggttaaaggtgagaagagagagatggccaagactttagtggctattcctgggtacagatgaatacatcataatttaatctactgtagagaacgagtttggtgttgcgagctctggagtcagactgcctgggttcacacacaggcttgaccctgggcaagttgcttaatcactcagtgcttctgtattctcaactataatatggaaatgatagtgcctacctcattaggcttttatgaaaatcagatgatataaaacagtataagcactaaagagtaagcattaactatgttagccattaccaatagtatatatttaagaagaatgaggtaattctgtgtttacttatgaatactgttaatgacatagtgttttgtgaaaatgctacagaataatatgcttagtatgagtctattttgagaagaaaaaagaaacgcatgatatgtatttatgagggcatccaaagaagtctgaaagccaaatatcacccaaacattgaaccctcattactcctagggagtaggtgagggctggggaagaggggctgactttttttttttttttttaaataggtctttgcttgaattatcacacatgtattatttttgccactaactttaaaatttgtaacattttacagtggccttcctaggcttcaagttgaatatctctcatgttttattctaggaaaaaaaaattaactttttagggatgcggaaatggaggcccagagaggatggggggagccctctaagcactctctcatgcgtgtctcattgcatcctgtgcctaccataggcatgcaaacactctgaaattcgttctttcctttccctcatgcttatctgaggctttccttttactgtgtccaaacggcttccaccttcagtgtttcagtatcttctttcctacctctcataactttctcaccattgcctgcttttccttctcgccttgacaggcgccctcgccctgggaaactcactggagtggggacagatctcaggcgtttggcagtcacaaggacccccatctacacaattataccacagggtatgcctccaagttgctgtctcgtaaagggtccaaatgggctttttttttttttttttttttttgagaaggagtttcgctcttgttgcccaggctggagtgcaatggcgcgatcttggctcactgccatctctgcctcccgggttcaagcgattctcccgcctcagcctcccgagtagctgggattacaggcatgcgccaccacgcccggctaatttttgtatttttagtagagacagggtttctccatgttattcaggctggtctcgaactcctgacctcacgtgatccgcccgcctcggcctcccaaagtgctgcgattacaggcgtgaaccaccgcgcccggcctaaatgggcttttaaataacgtttttatttcagtcaagaaatagtgtttggtatgtttggcaggctcttttttctcctttaggtctttccttacacaggtgtttatttttgctttggctttctcttggaagttacaatgctattttgtaccttcgccacccacaacgttctcttccgtgctcatcttttatgatgtgttaatttttactgtctgagctcccatcaaagcgcatttctgcctcctcactttcacactccaatcgtctagccccatttatacacgttttccatttcagcccatggagaaacgctttataggatgatgggagaaggaaaggagaattagagataataagcagagcagattccaagcagtctctcccaccggaacccttagggtcgggaaccaagcctgccccggggtatccgggccaccagaacagggtcagcatcaaggcgcccaggcattggaagagctgattggttcccggacgaaccaatcaaccagcgaggccgtgcacggataggggagggccaaaactaccgaggggatggggttaaaggaaaaggcgcaggtgtgccagccaccaggttttgcgtgcacttttgcactccctggttcattaataaccttgaattctattctaaatgtctcctagttttcccgtttcgtacagctgaggtagtagatagaagggaaaacgttacttatcttaccattcataagatggttattaatagtcagtggaaaagtggccatggagctgggggaagggcaataaaatcctccacctctcctttcccgattccactctgggtcgtcaacctaactcagtcggttcctgaaatagctgatcagtcaaacgcaagcttaatcaccaaagcggattaccaaaatgttatattagacagttggaataagtttccccctccccaagggctgagggaaatagtactggcatttaccgaaagcgcagcattttactacctgctaaaggagaagcggaggaactcgcgggctgaaagtgagagaaactgagaccttcggaaatgtacaaccacgcactcggacacggccacctcccggaatcggacacaagctcccaggcgcagtgacatctcctccaagcctccacccccataaactcttcatcacgcgggggcgtcaactatattttgggagggtgggggtacagatagcagattttccttatgtgtttcaaacttcagagcttttctgcccgttttttttccccaagtgacagagaccccggattcacagacctgtctcaccttagctttcccacgctccagcgctgccacccacccctccaccacccataccggggctggagacgccgcgtccttgggctgggggaagagggagtggggagaagagggaaatggccagtgtaagtaaagagctccccgccgaggcctggacgccggcagctagtgagagccctgaggccgagaagcagggagagaagagggctggaaccgtgcggggaagggccgcgaggagagcaggggcgccgccggtgtcgctgcactcactctgcgtagccagtggcccagggcagccgccgagtctccttgaggatgaggatggggcgggcgatgtggtcggcgctgcactccacctcgtcctgagacagccccaggaactctggccgcccgtaggggaaacgcaggggcaggtccgagcctccgcagctgccgccgccgtgctcggagcctgagctgccagccatgatgccgcccatgaaattggccacggcagatttcactcgagtgagcatattactccggcgcccggctgcagcggtgcgagcaggaggcggcgggggccgggcaaggcgcagcgcggggcatgcaggctgcggtgggcgccgggcgcacggcgagtcgggccactgggacgcgccgcgcgcggctcccagagcctagtgctgcagggggccgagccccggcctctcgtgcttagtgccgcggtggccgccgcctccccccgctacacttccgcaacggagctgcatggagcgggccgaccgggggagtcaccgcgcgctccaggagcgcccaggcggctgcagctgcagcaggtcccttccccgccccctgcgctcggctccggcgtgcgctgaactgagcccacccggcgagctcgcggagccgccgcggctgctgccacggctactgccgccgggtcatgtgataatcaggctgcaagggctcaggctgctgcggtggccgttgctcagcccctcccctgccggcccaagcgagactcgcaccgggatcgtgacctcctgggggagggggagaccggctgagtcggtacctggcggaggggatgggggcgctgtgagctggaggcggtacaggtgttagcggctgtcacgtggagccgggcagccgggaaaaggattgaagaatccactcctgaggaatgctgccttcaccctccagaaaggaaactttgggagcaggaggggaaaggggagacaggtgcaatcagggtgggaagcttctaagtcctgcggtggaaaccagcagtcactgggtgtaagagactttccagggcttaaaaataaacaagcctatacggattgcatgagaattattaaaagtttttccctaggtatttgtcgatttacttttctttttattaccactatatgcatcattatctatggagcaaaccttatttcgaacccagaataagcttaatacacaagaaaaaagatctcttaagaaatcagaggctggtctgagggcagtggtatttacaattaattgatcacaaccagttacagatttctttgttctttctccactcccgctgcttcacttgactagcctaaaagaaaaagaaacagggaccattagtatttaattgttaaataaatttatacaagcattatcctccaacgtagcaacaaaagtatcttttcaaagcttacctcgtttactatctagacaaataaatgcattttcctccaacttaggaacaaaagtatcttttcaaagcttaccttgtttactatctagacacttaaatgcagtcgtatttgaattttttttaattcagaacattgttgcaaaattatctaagggcacttataaaacgaaagaagcttaagtagaacatagcaactcaaatgctaaagtaaaaatgaataaatacttataatgataaaacatttttggtgatcatatgttagaaaacacatcttaaaaactgaatacttcatcaaggctaacatttcttaaatattggctttttagggggaggggaaactttgcaatagaacgtgtatcctgttcatgtttacctatttaatttgccagaattcggtgttacttacgcagttatgcaccaaacagcttgctctgaattcaacggagaatacaggccctcgttcttctcagtcagtgtttgggaagg
